(19) United States
(12) Patent Application Publication
(10) Pub. No.: US 2021/0161976 A1
(43) Pub. Date: Jun. 3, 2021

(54) BACTERIA ENGINEERED TO TREAT DISEASES THAT BENEFIT FROM REDUCED GUT INFLAMMATION AND/OR TIGHTENED GUT MUCOSAL BARRIER

(71) Applicant: Synlogic Operating Company, Inc., Cambridge, MA (US)

(72) Inventors: Paul F. Miller, Salem, CT (US); Vincent M. Isabella, Cambridge, MA (US); Jonathan W. Kotula, Somerville, MA (US); Dean Falb, Sherborn, MA (US); Adam B. Fisher, Cambridge, MA (US); Yves Millet, Newton, MA (US); Ning Li, Winchester, MA (US)

(21) Appl. No.: 16/074,559

(22) PCT Filed: Feb. 3, 2017
(86) PCT No.: PCT/US2017/016603

§ 371 Date: Aug. 1, 2018

Related U.S. Application Data
(63) Continuation-in-part of application No. PCT/US2016/069052, filed on Dec. 28, 2016.
Application No. PCT/US2017/016603 is a continuation-in-part of application No. 15/260,319, filed on Sep. 8, 2016.
Application No. 15/260,319 is a continuation-in-part of application No. PCT/US2016/050836, filed on Sep. 8, 2016.
Application No. PCT/US2016/050836 is a continuation-in-part of application No. PCT/US2016/039444, filed on Jun. 24, 2016.
Application No. PCT/US2016/039444 is a continuation-in-part of application No. PCT/US2016/032565, filed on May 13, 2016.
Application No. PCT/US2016/032565 is a continuation-in-part of application No. PCT/US2016/020530, filed on Mar. 2, 2016.
(60) Provisional application No. 62/439,871, filed on Dec. 28, 2016.
(60) Provisional application No. 62/423,170, filed on Nov. 16, 2016.
(60) Provisional application No. 62/385,235, filed on Sep. 8, 2016.
(60) Provisional application No. 62/362,954, filed on Jul. 15, 2016.
(60) Provisional application No. 62/354,682, filed on Jun. 24, 2016.
(60) Provisional application No. 62/348,620, filed on Jun. 10, 2016.
(60) Provisional application No. 62/347,508, filed on Jun. 8, 2016.
(60) Provisional application No. 62/347,576, filed on Jun. 8, 2016.
(60) Provisional application No. 62/291,468, filed on Feb. 4, 2016.
(60) Provisional application No. 62/291,470, filed on Feb. 4, 2016.
(60) Provisional application No. 62/291,461, filed on Feb. 4, 2016.

(51) Int. Cl. A61K 35/747; A61K 35/745; C12P 7/52; C12P 7/54; C12N 15/74; C12N 15/70; A61P 1/00

(52) U.S. Cl. CPC A61K 35/747; A61K 35/745; C12P 7/52; A61K 9/0053; C12N 15/746; C12N 15/70; A61P 1/00; C12P 7/54

(57) ABSTRACT

Genetically engineered bacteria, pharmaceutical compositions thereof, and methods of treating or preventing autoimmune disorders, inhibiting inflammatory mechanisms in the gut, and/or tightening gut mucosal barrier function are disclosed.

### RELATED APPLICATIONS

[0001] This application is a 35 U.S.C. § 371 national stage filing of International Application No. PCT/US2017/016603, filed on Feb. 3, 2017, which in turn is a continuation-in-part of PCT Application No. PCT/US2016/020530, filed Mar. 2, 2016; a continuation-in-part of PCT Application No. PCT/US2016/050836, filed Sep. 8, 2016, a continuation-in-part of PCT/US2016/039444, filed Jun. 24, 2016; a continuation-in-part of PCT Application No. PCT/US2016/069052, filed Dec. 28, 2016; a continuation-in-part of PCT Application No. PCT/US2016/032565, filed May 13, 2016, and a continuation-in-part of U.S. application Ser. No. 15/260,319, filed Sep. 8, 2016; and claims the benefit of U.S. Provisional Application No. 62/291,461 filed Feb. 4, 2016; U.S. Provisional Application No. 62/291,468 filed Feb. 4, 2016; U.S. Provisional Application No. 62/291,470 filed Feb. 4, 2016; U.S. Provisional Application No. 62/347,508, filed Jun. 8, 2016; U.S. Provisional Application No. 62/354,682, filed Jun. 24, 2016; U.S. Provisional Application No. 62/362,954, filed Jul. 15, 2016; U.S. Provisional Application No. 62/385,235, filed Sep. 8, 2016; U.S. Provisional Application No. 62/423,170, filed Nov. 16, 2016; U.S. Provisional Application No. 62/439,871, filed Dec. 28, 2016; U.S. Provisional Application No. 62/347,576, filed Jun. 8, 2016 and U.S. Provisional Application No. 62/348,620, filed Jun. 10, 2016. The entire contents of each of the foregoing applications are expressly incorporated herein by reference in their entireties to provide continuity of disclosure.

[0002] The instant application contains a Sequence Listing which has been submitted electronically in ASCII format and is hereby incorporated by reference in its entirety. Said ASCII copy, created on Dec. 1, 2019, is named 12671-2008-00-Corrected-Seq-Listing.txt and is 889,000 bytes in size.

### BACKGROUND OF THE INVENTION

[0003] This disclosure relates to compositions and therapeutic methods for inhibiting inflammatory mechanisms in the gut, restoring and tightening gut mucosal barrier function, and/or treating and preventing autoimmune disorders. In certain aspects, the disclosure relates to genetically engineered bacteria that are capable of reducing inflammation in the gut and/or enhancing gut barrier function. In some embodiments, the genetically engineered bacteria are capable of reducing gut inflammation and/or enhancing gut barrier function, thereby ameliorating or preventing an autoimmune disorder. In some aspects, the compositions and methods disclosed herein may be used for treating or preventing autoimmune disorders as well as diseases and conditions associated with gut inflammation and/or compromised gut barrier function, e.g., diarrheal diseases, inflammatory bowel diseases, and related diseases.

[0004] Inflammatory bowel diseases (IBDs) are a group of diseases characterized by significant local inflammation in the gastrointestinal tract typically driven by T cells and activated macrophages and by compromised function of the epithelial barrier that separates the luminal contents of the gut from the host circulatory system (Ghishan et al., 2014). IBD pathogenesis is linked to both genetic and environmental factors and may be caused by altered interactions between gut microbes and the intestinal immune system. Current approaches to treat IBD are focused on therapeutics that modulate the immune system and suppress inflammation. These therapies include steroids, such as prednisone, and tumor necrosis factor (TNF) inhibitors, such as Humira® (Cohen et al., 2014). Drawbacks from this approach are associated with systemic immunosuppression, which includes greater susceptibility to infectious disease and cancer.

[0005] Other approaches have focused on treating compromised barrier function by supplying the short-chain fatty acid butyrate via enemas. Recently, several groups have demonstrated the importance of short-chain fatty acid production by commensal bacteria in regulating the immune system in the gut (Smith et al., 2013), showing that butyrate plays a direct role in inducing the differentiation of regulatory T cells and suppressing immune responses associated with inflammation in IBD (Atarashi et al., 2011; Furusawa et al., 2013). Butyrate is normally produced by microbial fermentation of dietary fiber and plays a central role in maintaining colonic epithelial cell homeostasis and barrier function (Hamer et al., 2008). Studies with butyrate enemas have shown some benefit to patients, but this treatment is not practical for long term therapy. More recently, patients with IBD have been treated with fecal transfer from healthy patients with some success (Ianiro et al., 2014). This success illustrates the central role that gut microbes play in disease pathology and suggests that certain microbial functions are associated with ameliorating the IBD disease process. However, this approach raises safety concerns over the transmission of infectious disease from the donor to the recipient. Moreover, the nature of this treatment has a negative stigma and thus is unlikely to be widely accepted.

[0006] Compromised gut barrier function also plays a central role in autoimmune diseases pathogenesis (Lerner et al., 2015a; Lerner et al., 2015b; Fasano et al., 2005; Fasano, 2012). A single layer of epithelial cells separates the gut lumen from the immune cells in the body. The epithelium is regulated by intercellular tight junctions and controls the equilibrium between tolerance and immunity to nonself-antigens (Fasano et al., 2005). Disrupting the epithelial layer can lead to pathological exposure of the highly immunoreactive subepithelium to the vast number of foreign antigens in the lumen (Lerner et al., 2015a) resulting in increased susceptibility to and both intestinal and extraintestinal autoimmune disorders can o ccur” (Fasano et al., 2005). Some foreign antigens are postulated to resemble self-antigens and can induce epitope-specific cross-reactivity that accelerates the progression of a pre-existing autoimmune disease or initiates an autoimmune disease (Fasano, 2012). Rheumatoid arthritis and celiac disease, for example, are autoimmune disorders that are thought to involve increased intestinal permeability (Lerner et al., 2015b). In individuals who are genetically susceptible to autoimmune disorders, dysregulation of intercellular tight junctions can lead to disease onset (Fasano, 2012). In fact, the loss of protective function of mucosal barriers that interact with the environment is necessary for autoimmunity to develop (Lerner et al., 2015a).

[0007] Changes in gut microbes can alter the host immune response (Paun et al., 2015; Sanz et al., 2014: Sanz et al., 2015; Wen et al., 2008). For example, in children with high genetic risk for type 1 diabetes, there are significant differences in the gut microbiome between children who develop autoimmunity for the disease and those who remain healthy (Richardson et al., 2015). Others have shown that gut bacteria are a potential therapeutic target in the prevention of asthma and exhibit strong immunomodulatory capacity . . . in lung inflammation (Arrieta et al., 2015). Thus, enhancing barrier function and reducing inflammation in the gastrointestinal tract are potential therapeutic mechanisms for the treatment or prevention of autoimmune disorders.

[0008] Recently there has been an effort to engineer microbes that produce anti-inflammatory molecules, such as IL-10, and administer them orally to a patient in order to deliver the therapeutic directly to the site of inflammation in the gut. The advantage of this approach is that it avoids systemic administration of immunosuppressive drugs and delivers the therapeutic directly to the gastrointestinal tract. However, while these engineered microbes have shown efficacy in some pre-clinical models, efficacy in patients has not been observed. One reason for the lack of success in treating patients is that the viability and stability of the microbes are compromised due to the constitutive production of large amounts of non-native proteins, e.g., human interleukin. Thus, there remains a great need for additional therapies to reduce gut inflammation, enhance gut barrier function, and/or treat autoimmune disorders, and that avoid undesirable side effects.

### SUMMARY

[0009] The genetically engineered bacteria disclosed herein are capable of producing therapeutic anti-inflammation and/or gut barrier enhancer molecules. In some embodiments, the genetically engineered bacteria are functionally silent until they reach an inducing environment, e.g., a mammalian gut, wherein expression of the therapeutic molecule is induced. In certain embodiments, the genetically engineered bacteria are naturally non-pathogenic and may be introduced into the gut in order to reduce gut inflammation and/or enhance gut barrier function and may thereby further ameliorate or prevent an autoimmune disorder. In certain embodiments, the anti-inflammation and/or gut barrier enhancer molecule is stably produced by the genetically engineered bacteria, and/or the genetically engineered bacteria are stably maintained in vivo and/or in vitro. The invention also provides pharmaceutical compositions comprising the genetically engineered bacteria, and methods of treating diseases that benefit from reduced gut inflammation and/or tightened gut mucosal barrier function, e.g., an inflammatory bowel disease or an autoimmune disorder.

[0010] In some embodiments, the genetically engineered bacteria of the invention produce one or more therapeutic molecule(s) under the control of one or more promoters induced by an environmental condition, e.g., an environmental condition found in the mammalian gut, such as an inflammatory condition or a low oxygen condition. In on-limiting exemplary embodiments, the genetically engineered bacteria produce one or more therapeutic molecule(s) under the control of an oxygen level-dependent promoter, a reactive oxygen species (ROS)-dependent promoter, or a reactive nitrogen species (RNS)-dependent promoter, and a corresponding transcription factor. In some embodiments, the therapeutic molecule is butyrate; in an inducing environment, the butyrate biosynthetic gene cassette is activated, and butyrate is produced. Local production of butyrate induces the differentiation of regulatory T cells in the gut and/or promotes the barrier function of colonic epithelial cells. In some embodiments, the genetically engineered bacteria produce their therapeutic effect only in inducing environments such as the gut, thereby lowering the safety issues associated with systemic exposure.

[0011] Disclosed herein is a butyrate-producing bacterium comprising at least one gene or gene cassette encoding one or more non-native biosynthetic pathways for producing butyrate, wherein the bacteria produces acetyl CoA and wherein the bacterium has at least one mutation in or deletion of an endogenous pta gene. Such bacterium is capable of producing butyrate, but does not produce acetate. In some embodiments, the bacterium further has at least one mutation in or deletion of an endogenous adhE gene. In some embodiments, the bacterium further has at least one mutation in or deletion of an endogenous ldhA gene. In some embodiments, the bacterium further has at least one mutation in or deletion of an endogenous frd gene. In some embodiments, the bacterium further has at least one mutation in or deletion of an endogenous adhE gene and an endogenous ldhA gene. In some embodiments, the bacterium further has at least one mutation in or deletion of an endogenous adhE gene and an endogenous frd gene. In some embodiments, the bacterium further has at least one mutation in or deletion of an endogenous ldhA gene and an endogenous frd gene. In some embodiments, the bacterium further has at least one mutation in or deletion of an endogenous adhE gene, an endogenous frd gene, and an endogenous ldhA gene. In certain specific embodiments, the butyrate-producing bacterium comprises at least one gene or gene cassette encoding one or more non-native biosynthetic pathways for producing butyrate, wherein the bacteria produces acetyl CoA and wherein the bacterium has at least one mutation in or deletion of an endogenous pta gene and at least one mutation in or deletion of an endogenous gene selected from adhE gene and/or ldhA gene and/or frd gene.

[0012] In any of the above described embodiments of butyrate-producing bacteria, the at least one gene or gene cassette for producing butyrate is operably linked to a directly or indirectly inducible promoter that is not associated with the gene or gene cassette in nature. In any of the above described embodiments of butyrate-producing bacteria, the at least one gene or gene cassette for producing butyrate is operably linked to a directly or indirectly inducible promoter that is not associated with the gene or gene cassette in nature and is induced by exogenous environmental conditions found in a mammalian gut.

[0013] In some embodiments, the butyrate-producing bacterium may produce an increased level of butyrate as compared to a bacterium which produces butyrate naturally or which comprises a gene or gene cassette for producing butyrate, but does not comprise at least one mutation in or deletion of an endogenous ldhA gene. In some embodiments, the butyrate-producing bacterium may produce an increased level of butyrate as compared to a bacterium which produces butyrate naturally or which comprises a gene or gene cassette for producing butyrate, but does not comprise at least one mutation in or deletion of an endogenous adhE gene. In some embodiments, the butyrate-producing bacterium may produce an increased level of butyrate as compared to a bacterium which produces butyrate naturally or which comprises a gene or gene cassette for producing butyrate, but does not comprise at least one mutation in or deletion of an endogenous frd gene. In some embodiments, the butyrate-producing bacterium may produce an increased level of butyrate as compared to a bacterium which produces butyrate naturally or which comprises a gene or gene cassette for producing butyrate, but does not comprise at least one mutation in or deletion of an endogenous pta gene. In some embodiments, the butyrate-producing bacterium may produce an increased level of butyrate as compared to a bacterium which produces butyrate naturally or which comprises a gene or gene cassette for producing butyrate, but does not comprise at least one mutation in or deletion of an endogenous gene selected from frd and/or ldhA and/or adhE and/or pta. In some embodiments, the butyrate-producing bacterium may produce an increased level of butyrate as compared to a bacterium which produces butyrate naturally or which comprises a gene or gene cassette for producing butyrate, but does not comprise at least one mutation in or deletion of an endogenous ldhA gene, frd gene, adhE gene, and pta gene.

[0014] In some embodiments, the bacterium described above comprises an endogenous pta gene and produces acetate. In these embodiments, the bacterium comprises at least one gene or gene cassette encoding one or more non-native biosynthetic pathways for producing butyrate, wherein the bacteria produces acetyl CoA and wherein the bacterium has an endogenous pta gene. Such bacterium is capable of producing butyrate and acetate. In some embodiments of this bacterium, the bacterium further has at least one mutation in or deletion of an endogenous adhE gene. In some embodiments, the bacterium further has at least one mutation in or deletion of an endogenous ldhA gene. In some embodiments, the bacterium further has at least one mutation in or deletion of an endogenous frd gene. In some embodiments, the bacterium further has at least one mutation in or deletion of an endogenous adhE gene and an endogenous ldhA gene. In some embodiments, the bacterium further has at least one mutation in or deletion of an endogenous adhE gene and an endogenous frd gene. In some embodiments, the bacterium further has at least one mutation in or deletion of an endogenous ldhA gene and an endogenous frd gene. In some embodiments, the bacterium further has at least one mutation in or deletion of an endogenous adhE gene, an endogenous frd gene, and an endogenous ldhA gene. In certain specific embodiments, the butyrate-producing bacterium comprises at least one gene or gene cassette encoding one or more non-native biosynthetic pathways for producing butyrate, wherein the bacteria produces acetyl CoA and wherein the bacterium has an endogenous pta gene and at least one mutation in or deletion of an endogenous gene selected from adhE gene and/or ldhA gene and/or frd gene.

[0015] In any of the above-described embodiments of butyrate-producing bacterium, the at least one gene or gene cassette for producing butyrate may comprise ter, thiA1, hbd, crt2, pbt, and buk genes. In any of the above-described embodiments of butyrate-producing bacterium, the at least one gene or gene cassette for producing butyrate may comprise ter, thiA1, hbd, crt2, and tesB genes.

[0016] In any of the above described embodiments of butyrate- and acetate-producing bacteria, the at least one gene or gene cassette for producing butyrate is operably linked to a directly or indirectly inducible promoter that is not associated with the gene or gene cassette in nature. In any of the above described embodiments of butyrate- and acetate-producing bacteria, the at least one gene or gene cassette for producing butyrate is operably linked to a directly or indirectly inducible promoter that is not associated with the gene or gene cassette in nature and is induced by exogenous environmental conditions found in a mammalian gut.

[0017] In another aspect, disclosed herein is an acetate-producing bacterium that produces acetate but not butyrate. In any of these embodiments, the acetate-producing bacterium produces acetyl CoA and comprises a wild-type pta gene. In some embodiments, the acetate-producing bacterium comprises at least one mutation in or deletion of a ldhA gene. In some embodiments, the acetate-producing bacterium comprises at least one mutation in or deletion of an adhE gene. In some embodiments, the acetate-producing bacterium comprises at least one mutation in or deletion of a frd gene. In some embodiments, the acetate-producing bacterium comprises at least one mutation in or deletion of an ldhA gene and at least one mutation in or deletion of an adhE gene. In some embodiments, the acetate-producing bacterium comprises at least one mutation in or deletion of a ldhA gene and at least one mutation in or deletion of an frd gene. In some embodiments, the acetate-producing bacterium comprises at least one mutation in or deletion of an adhA gene and at least one mutation in or deletion of an frd gene. In some embodiments, the acetate-producing bacterium comprises at least one mutation in or deletion of an adhA gene, at least one mutation in or deletion of an frd gene, and at least one mutation in or deletion of an ldhA gene.

[0018] The bacterium may produce an increased level of acetate as compared to a bacterium which produces Acetyl CoA and comprises an endogenous pta gene, and has an endogenous frd gene and/or endogenous ldhA gene and/or endogenous adhA gene. The bacterium may produce an increased level of acetate as compared to a bacterium which produces Acetyl CoA and comprises an endogenous pta gene, and does not comprise at least one mutation in or deletion of an ldhA gene, an adhE gene, and/or a frd gene.

[0019] In any of the above-described embodiments comprising a gene or gene cassette for producing butyrate in which the gene or gene cassette is operably linked to a directly or indirectly inducible promoter, the promoter may be induced under low-oxygen or anaerobic conditions. In some embodiments, the promoter is selected from an FNR-responsive promoter, an ANR-responsive promoter, and a DNR-responsive promoter. In some embodiments, the promoter is an FNR-responsive promoter. In some embodiments, the promoter may be induced by the presence of reactive nitrogen species. In some embodiments, the promoter is selected from an NsrR-responsive promoter, NorR-responsive promoter, and a DNR-responsive promoter. In some embodiments, the promoter may be induced by the presence of reactive oxygen species. In some embodiments, the promoter is selected from an OxyR-responsive promoter, PerR-responsive promoter, OhrR-responsive promoter, SoxR-responsive promoter, or a RosR-responsive promoter.

[0020] In some embodiments, the gene and/or gene cassette is located on a chromosome in the bacterium. In some embodiments, the at least one gene and/or gene cassette is located on a plasmid in the bacterium.

[0021] In some embodiments, the bacterium is a probiotic bacterium. In some embodiments, the bacterium is selected from the group consisting of Bacteroides, Bifidobacterium, Clostridium, Escherichia, Lactobacillus, and Lactococcus. In some embodiments, the bacterium is Escherichia coli strain Nissle.

[0022] In some embodiments, the bacterium is an an auxotroph in a gene that is complemented when the bacterium is present in a mammalian gut. The bacterium may be an auxotroph in diaminopimelic acid or an enzyme in the thymine biosynthetic pathway.

[0023] Disclosed herein is a pharmaceutically acceptable composition comprising one or more of any of the bacterium disclosed herein; and a pharmaceutically acceptable carrier. In some embodiments, the composition is formulated for oral or rectal administration.

[0024] Disclosed herein is a method of treating or preventing an autoimmune disorder, comprising the step of administering to a patient in need thereof, a composition disclosed herein.

[0025] Disclosed herein is a method of treating a disease or condition associated with gut inflammation and/or compromised gut barrier function comprising the step of administering to a patient in need thereof, a composition.

[0026] The autoimmune disorder may be selected from the group consisting of acute disseminated encephalomyelitis (ADEM), acute necrotizing hemorrhagic leukoencephalitis, Addison's disease, agammaglobulinemia, alopecia areata, amyloidosis, ankylosing spondylitis, anti-GBM/anti-TBM nephritis, antiphospholipid syndrome (APS), autoimmune angioedema, autoimmune aplastic anemia, autoimmune dysautonomia, autoimmune hemolytic anemia, autoimmune hepatitis, autoimmune hyperlipidemia, autoimmune immunodeficiency, autoimmune inner ear disease (AIED), autoimmune myocarditis, autoimmune oophoritis, autoimmune pancreatitis, autoimmune retinopathy, autoimmune thrombocytopenic purpura (ATP), autoimmune thyroid disease, autoimmune urticarial, Axonal & neuronal neuropathies, Balo disease, Behcet's disease, Bullous pemphigoid, Cardiomyopathy, Castleman disease, Celiac disease, Chagas disease, Chronic inflammatory demyelinating polyneuropathy (CIDP), Chronic recurrent multifocal ostomyelitis (CRMO), Churg-Strauss syndrome, Cicatricial pemphigoid/benign mucosal pemphigoid, Crohn's disease, Cogan syndrome, Cold agglutinin disease, Congenital heart block, Coxsackie myocarditis, CREST disease, Essential mixed cryoglobulinemia, Demyelinating neuropathies, Dermatitis herpetiformis, Dermatomyositis, Devic's disease (neuromyelitis optica), Discoid lupus, Dressier's syndrome, Endometriosis, Eosinophilic esophagitis, Eosinophilic fasciitis, Erythema nodosum, Experimental allergic encephalomyelitis, Evans syndrome, Fibrosing alveolitis, Giant cell arteritis (temporal arteritis), Giant cell myocarditis, Glomerulonephritis, Goodpasture's syndrome, Granulomatosis with Polyangiitis (GPA), Graves' disease, Guillain-Barre syndrome, Hashimoto's encephalitis, Hashimoto's thyroiditis, Hemolytic anemia, Henoch-Schonlein purpura, Herpes gestationis, Hypogammaglobulinemia, Idiopathic thrombocytopenic purpura (ITP), IgA nephropathy, IgG4-related sclerosing disease, Immunoregulatory lipoproteins, Inclusion body myositis, Interstitial cystitis, Juvenile arthritis, Juvenile idiopathic arthritis, Juvenile myositis, Kawasaki syndrome, Lambert-Eaton syndrome, Leukocytoclastic vasculitis, Lichen planus, Lichen sclerosus, Ligneous conjunctivitis, Linear IgA disease (LAD), Lupus (Systemic Lupus Erythematosus), chronic Lyme disease, Meniere's disease, Microscopic polyangiitis, Mixed connective tissue disease (MCTD), Mooren's ulcer, Mucha-Habermann disease, Multiple sclerosis, Myasthenia gravis, Myositis, Narcolepsy, Neuromyelitis optica (Devic's), Neutropenia, Ocular cicatricial pemphigoid, Optic neuritis, Palindromic rheumatism, PANDAS (Pediatric autoimmune Neuropsychiatric Disorders Associated with Streptococcus), Paraneoplastic cerebellar degeneration, Paroxysmal nocturnal hemoglobinuria (PNH), Parry Romberg syndrome, Parsonnage-Turner syndrome, Pars planitis (peripheral uveitis), Pemphigus, Peripheral neuropathy, Perivenous encephalomyelitis, Pernicious anemia, POEMS syndrome, Polyarteritis nodosa, Type I, II, & III autoimmune polyglandular syndromes, Polymyalgia rheumatic, Polymyositis, Postmyocardial infarction syndrome, Postpericardiotomy syndrome, Progesterone dermatitis, Primary biliary cirrhosis, Primary sclerosing cholangitis, Psoriasis, Psoriatic arthritis, Idiopathic pulmonary fibrosis, Pyoderma gangrenosum, Pure red cell aplasia, Raynauds phenomenon, reactive arthritis, reflex sympathetic dystrophy, Reiter's syndrome, relapsing polychondritis, restless legs syndrome, retroperitoneal fibrosis, rheumatic fever, rheumatoid arthritis, sarcoidosis, Schmidt syndrome, scleritis, scleroderma, Sjogren's syndrome, sperm & testicular autoimmunity, stiff person syndrome, subacute bacterial endocarditis (SBE), Susac's syndrome, sympathetic ophthalmia, Takayasu's arteritis, temporal arteritis/giant cell arteritis, thrombocytopenic purpura (TTP), Tolosa-Hunt syndrome, transverse myelitis, type 1 diabetes, asthma, ulcerative colitis, undifferentiated connective tissue disease (UCTD), uveitis, vasculitis, vesiculobullous dermatosis, vitiligo, and Wegener's granulomatosis.

[0027] The autoimmune disorder may be selected from the group consisting of type 1 diabetes, lupus, rheumatoid arthritis, ulcerative colitis, juvenile arthritis, psoriasis, psoriatic arthritis, celiac disease, and ankylosing spondylitis.

[0028] The disease or condition may be selected from an inflammatory bowel disease, including Crohn's disease and ulcerative colitis, and a diarrheal disease.

### BRIEF DESCRIPTION OF THE FIGURES

[0029] FIG. 1A, FIG. 1B, FIG. 1C, FIG. 1D, FIG. 1E, FIG. 1F, FIG. 1G, FIG. 1H, FIG. 1I, FIG. 1J, and FIG. 1K depict schematics of E. coli that are genetically engineered to express a propionate biosynthesis cassette (FIG. 1A), a butyrate biosynthesis cassette (FIG. 1B), an acetate biosynthesis cassette (FIG. 1C), a cassette for the expression of GLP-2 (FIG. 1D), a cassette for the expression of human IL-10 (FIG. 1E) or v-IL-22 or hIL-22 (FIG. 1F) under the control of a FNR-responsive promoter. The genetically engineered E. coli depicted in FIG. 1D, FIG. 1E, and FIG. 1F may further comprise a secretion system for secretion of the expressed polypeptide out of the cell. FIG. 1G depicts bacteria overexpressing butyrate (and not expressing acetate) by expressing a butyrate biosynthesis cassette in combination with deletions in adhE and pta (FIG. 1G), FIG. 1H depicts bacteria overexpressing butyrate by expressing a butyrate biosynthesis cassette in combination with deletions in ldhA, FIG. 1I depicts bacteria overexpressing butyrate by expressing a butyrate biosynthesis cassette in combination with deletions in adhE and frdA (FIG. 1I). FIG. 1J depicts bacteria overexpressing acetate by deletion in ldhA. FIG. 1K depicts bacteria overexpressing GLP-2 in combination with a deletion in adhE and pta.

[0030] FIG. 2A, FIG. 2B, FIG. 2C, and FIG. 2D depict schematics of a butyrate production pathway and schematics of different butyrate producing circuits. FIG. 2A depicts a metabolic pathway for butyrate production. FIG. 2B and FIG. 2C depict schematics of two different exemplary butyrate producing circuits, both under the control of a tetracycline inducible promoter. FIG. 2B depicts a bdc2 butyrate cassette under control of tet promoter on a plasmid. A “bdc2 cassette” or “bdc2 butyrate cassette” refres to a butyrate producing cassette that comprises at least the following genes: bcd2, etfB3, etfA3, hbd, crt2, pbt, and buk genes. FIG. 2C depicts a ter butyrate cassette (ter gene replaces the bcd2, etfB3, and etfA3 genes) under control of tet promoter on a plasmid. A “ter cassette” or “ter butyrate cassette” refers to a butyrate producing cassette that comprises at least the following genes: ter, thiA1, hbd, crt2, pbt, buk. FIG. 2D depicts a schematic of a third exemplary butyrate gene cassette under the control of a tetracycline inducible promoter, specifically, a tesB butyrate cassette (ter gene is present and tesB gene replaces the pbt gene and the buk gene) under control of tet promoter on a plasmid. A “tes or tesB cassette or “tes or tesB butyrate cassette” refers to a butyrate producing cassette that comprises at least ter, thiA1, hbd, crt2, and tesB genes. An alternative butyrate cassette of the disclosure comprises at least bcd2, etfB3, etfA3, thiA1, hbd, crt2, and tesB genes. In some embodiments, the tes or tesB cassette is under control of an inducible promoter other than tetracycline. Exemplary inducible promoters which may control the expression of the tesB cassette include oxygen level-dependent promoters (e.g., FNR-inducible promoter), promoters induced by inflammation or an inflammatory response (RNS, ROS promoters), and promoters induced by a metabolite that may or may not be naturally present (e.g., can be exogenously added) in the gut, e.g., arabinose and tetracycline.

[0031] FIG. 3A, FIG. 3B, FIG. 3C, FIG. 3D, FIG. 3E, and FIG. 3F depict schematics of the gene organization of exemplary bacteria of the disclosure. FIG. 3A and FIG. 3B depict the gene organization of an exemplary engineered bacterium of the invention and its induction of butyrate production under low-oxygen conditions. FIG. 3A depicts relatively low butyrate production under aerobic conditions in which oxygen (O₂) prevents (indicated by “X”) FNR (boxed “FNR”) from dimerizing and activating the FNR-responsive promoter (“FNR promoter”). Therefore, none of the butyrate biosynthesis enzymes (hcd2, etfB3, etfA3, thiA1, hbd, crt2, pbt, and buk; white boxes) is expressed. FIG. 3B depicts increased butyrate production under low-oxygen or anaerobic conditions due to FNR dimerizing (two boxed “FNR”s), binding to the FNR-responsive promoter, and inducing expression of the butyrate biosynthesis enzymes, which leads to the production of butyrate. FIG. 3C and FIG. 3D depict the gene organization of an exemplary recombinant bacterium of the invention and its derepression in the presence of nitric oxide (NO). In FIG. 3C, in the absence of NO, the NsrR transcription factor (circle, “NsrR”) binds to and represses a corresponding regulatory region. Therefore, none of the butyrate biosynthesis enzymes (bcd2, etfB3, etfA3, thiA1, hbd, crt2, pbt, buk) is expressed. In FIG. 3D, in the presence of NO, the NsrR transcription factor interacts with NO, and no longer binds to or represses the regulatory sequence. This leads to expression of the butyrate biosynthesis enzymes (indicated by black arrows and black squiggles) and ultimately to the production of butyrate.

[0032] FIG. 3E and FIG. 3F depict the gene organization of an exemplary recombinant bacterium of the invention and its induction in the presence of H2O2. In FIG. 3E, in the absence of H2O2, the OxyR transcription factor (circle, “OxyR”) binds to, but does not induce, the oxyS promoter. Therefore, none of the butyrate biosynthesis enzymes (bcd2, etfB3, etfA3, thiA1, hbd, crt2, pbt, buk) is expressed. In FIG. 3F, in the presence of H2O2, the OxyR transcription factor interacts with H2O2 and is then capable of inducing the oxyS promoter. This leads to expression of the butyrate biosynthesis enzymes (indicated by black arrows and black squiggles) and ultimately to the production of butyrate.

[0033] FIG. 4A, FIG. 4B, FIG. 4C, FIG. 4D, FIG. 4E, and FIG. 4F depict schematics of the gene organization of exemplary bacteria of the disclosure. FIG. 4A and FIG. 4B depict the gene organization of another exemplary engineered bacterium of the invention and its induction of butyrate production under low-oxygen conditions using a different butyrate circuit from that shown in FIG. 3A. FIG. 3B, FIG. 3C, FIG. 3D, FIG. 3E, and FIG. 3F. FIG. 4A depicts relatively low butyrate production under aerobic conditions in which oxygen (O₂) prevents (indicated by “X”) FNR (boxed “FNR”) from dimerizing and activating the FNR-responsive promoter (“FNR promoter”). Therefore, none of the butyrate biosynthesis enzymes (ter, thiA1, hbd, crt2, pbt, and buk; white boxes) is expressed. FIG. 4B depicts increased butyrate production under low-oxygen or anaerobic conditions due to FNR dimerizing (two boxed “FNR”s), binding to the FNR-responsive promoter, and inducing expression of the butyrate biosynthesis enzymes, which leads to the production of butyrate. FIG. 4C and FIG. 4D depict the gene organization of another exemplary recombinant bacterium of the invention and its derepression in the presence of NO. In FIG. 4C, in the absence of NO, the NsrR transcription factor (circle, “NsrR”) binds to and represses a corresponding regulatory region. Therefore, none of the butyrate biosynthesis enzymes (ter, thiA1, hbd, crt2, pbt, buk) is expressed. In FIG. 4D, in the presence of NO, the NsrR transcription factor interacts with NO, and no longer binds to or represses the regulatory sequence. This leads to expression of the butyrate biosynthesis enzymes (indicated by black arrows and black squiggles) and ultimately to the production of butyrate. FIG. 4E and FIG. 4F depict the gene organization of another exemplary recombinant bacterium of the invention and its induction in the presence of H₂O₂. In FIG. 4E, in the absence of H₂O₂, the OxyR transcription factor (circle, “OxyR”) binds to, but does not induce, the oxyS promoter. Therefore, none of the butyrate biosynthesis enzymes (ter, thiA1, hbd, crt2, pbt, buk) is expressed. In FIG. 4F, in the presence of H₂O₂, the OxyR transcription factor interacts with H₂O₂ and is then capable of inducing the ox'S promoter. This leads to expression of the butyrate biosynthesis enzymes (indicated by black arrows and black squiggles) and ultimately to the production of butyrate.

[0034] FIG. 5A, FIG. 5B, FIG. 5C, FIG. 5D, FIG. 5E, and FIG. 5F depict schematics of the gene organization of exemplary bacteria of the disclosure. FIG. 5A and FIG. 5B depict the gene organization of an exemplary recombinant bacterium of the invention and its induction under low-oxygen conditions. FIG. 5A depicts relatively low butyrate production under aerobic conditions in which oxygen (O₂) prevents (indicated by “X”) FNR (boxed “FNR”) from dimerizing and activating the FNR-responsive promoter (“FNR promoter”). Therefore, none of the butyrate biosynthesis enzymes (ter, thiA1, hbd, crt2, and tesB) is expressed. FIG. 5B depicts increased butyrate production under low-oxygen conditions due to FNR dimerizing (two boxed “FNR”s), binding to the FNR-responsive promoter, and inducing expression of the butyrate biosynthesis enzymes, which leads to the production of butyrate. FIG. 5C and FIG. 5D depict the gene organization of another exemplary recombinant bacterium of the invention and its derepression in the presence of NO. In FIG. 5C, in the absence of NO, the NsrR transcription factor (“NsrR”) binds to and represses a corresponding regulatory region. Therefore, none of the butyrate biosynthesis enzymes (ter, thiA1, hbd, crt2, tesB) is expressed. In FIG. 5D, in the presence of NO, the NsrR transcription factor interacts with NO, and no longer binds to or represses the regulatory sequence. This leads to expression of the butyrate biosynthesis enzymes (indicated by black arrows and black squiggles) and ultimately to the production of butyrate. FIG. 5E and FIG. 5F depict the gene organization of another exemplary recombinant bacterium of the invention and its induction in the presence of H₂O₂. In FIG. 5E, in the absence of H₂O₂, the OxyR transcription factor (circle, “OxyR”) binds to, but does not induce, the oxyS promoter. Therefore, none of the butyrate biosynthesis enzymes (t/e; thiA1, hbd, crt2, tesB) is expressed. In FIG. 6F, in the presence of H₂O₂, the OxyR transcription factor interacts with H₂O₂ and is then capable of inducing the oxyS promoter. This leads to expression of the butyrate biosynthesis enzymes (indicated by black arrows and black squiggles) and ultimately to the production of butyrate.

[0035] FIG. 6A and FIG. 6B depict schematics of the gene organization of exemplary bacteria of the disclosure for inducible propionate production. FIG. 6A depicts relatively low propionate production under aerobic conditions in which oxygen (O₂) prevents (indicated by “X”) FNR (boxed “FNR”) from dimerizing and activating the FNR-responsive promoter (“FNR promoter”). Therefore, none of the propionate biosynthesis enzymes (pt, lcdA, lcdB, lcdC, etfA, acrB, acrC) is expressed. FIG. 6B depicts increased propionate production under low-oxygen or anaerobic conditions due to FNR dimerizing (two boxed “FNR”s), binding to the FNR-responsive promoter, and inducing expression of the propionate biosynthesis enzymes, which leads to the production of propionate. In other embodiments, propionate production is induced by NO or H₂O₂ as depicted and described for the butyrate cassette(s) in the preceding FIG. 3C-3F, FIG. 4C-4F, FIG. 5C-5F.

[0036] FIG. 7 depicts an exemplary propionate biosynthesis gene cassette.

[0037] FIG. 8A, FIG. 8B, and FIG. 8C depict schematics of the gene organization of exemplary bacteria of the disclosure for inducible propionate production. FIG. 8A depicts relatively low propionate production under aerobic conditions in which oxygen (O₂) prevents (indicated by “X”) FNR (boxed “FNR”) from dimerizing and activating the FNR-responsive promoter (“FNR promoter”). Therefore, none of the propionate biosynthesis enzymes (thrA, thrB, thrC, ilvA, aceE, aceF, lpd) is expressed. FIG. 8B depicts increased propionate production under low-oxygen or anaerobic conditions due to FNR dimerizing (two boxed “FNR”s), binding to the FNR-responsive promoter, and inducing expression of the propionate biosynthesis enzymes, which leads to the production of propionate. FIG. 8C depicts an exemplary propionate biosynthesis gene cassette. In other embodiments, propionate production is induced by NO or H₂O₂ as depicted and described for the butyrate cassette(s) in the preceding FIG. 3C-3F, FIG. 4C-4F, FIG. 5C-5F.

[0038] FIG. 9A and FIG. 9B depict schematics of the gene organization of exemplary bacteria of the disclosure for inducible propionate production. FIG. 9A depicts relatively low propionate production under aerobic conditions in which oxygen (O₂) prevents (indicated by “X”) FNR (boxed “FNR”) from dimerizing and activating the FNR-responsive promoter (“FNR promoter”). Therefore, none of the propionate biosynthesis enzymes (thrA, thrB, thrC, ilvA, aceE, aceF, lpd, tesB) is expressed. FIG. 9B depicts increased propionate production under low-oxygen or anaerobic conditions due to FNR dimerizing (two boxed “FNR”s), binding to the FNR-responsive promoter, and inducing expression of the propionate biosynthesis enzymes, which leads to the production of propionate. In other embodiments, propionate production is induced by NO or H₂O₂ as depicted and described for the butyrate cassette(s) in the preceding FIG. 3C-3F, FIG. 4C-4F, FIG. 5C-5F.

[0039] FIG. 10A, FIG. 10B, and FIG. 10C depict schematics of the sleeping beauty pathway and the gene organization of an exemplary bacterium of the disclosure. FIG. 10A depicts a schematic of a genetically engineered sleeping beauty metabolic pathway from E. coli for propionate production. The SBM pathway is cyclical and composed of a series of biochemical conversions forming propionate as a fermentative product while regenerating the starting molecule of succinyl-CoA. FIG. 10B and FIG. 10C depict schematics of the gene organization of another exemplary engineered bacterium of the invention and its induction of propionate production under low-oxygen conditions. FIG. 10B depicts relatively low propionate production under aerobic conditions in which oxygen (O₂) prevents (indicated by “X”) FNR (boxed “FNR”) from dimerizing and activating the FNR-responsive promoter (“FNR promoter”). Therefore, none of the propionate biosynthesis enzymes (sbm, ygfD, ygfG, ygfH) is expressed. FIG. 10C depicts increased propionate production under low-oxygen or anaerobic conditions due to FNR dimerizing (two boxed “FNR”s), binding to the FNR-responsive promoter, and inducing expression of the propionate biosynthesis enzymes, which leads to the production of propionate. In other embodiments, propionate production is induced by NO or H₂O₂ as depicted and described for the butyrate cassette(s) in the preceding FIG. 3C-3F, FIG. 4C-4F, FIG. 5C-5F.

[0040] FIG. 11 depicts a bar graph showing butyrate production of butyrate producing strains of the disclosure. FIG. 11 shows butyrate production in strains pLOGIC031 and pLOGIC046 in the presence and absence of oxygen, in which there is no significant difference in butyrate production. Enhanced butyrate production was shown in Nissle in low copy plasmid expressing pLOGIC046 which contain a deletion of the final two genes (ptb-buk) and their replacement with the endogenous E. coli tesB gene (a thioesterase that cleaves off the butyrate portion from butyryl CoA). Overnight cultures of cells were diluted 1:100 in Lb and grown for 1.5 hours until early log phase was reached at which point anhydrous tet was added at a final concentration of 100 ng/ml to induce plasmid expression. After 2 hours induction, cells were washed and resuspended in M9 minimal media containing 0.5% glucose at OD600=0.5. Samples were removed at indicated times and cells spun down. The supernatant was tested for butyrate production using LC-MS.

[0041] FIG. 12 depicts a bar graph showing butyrate production of butyrate producing strains of the disclosure. FIG. 12 shows butyrate production in strains comprising a tet-butyrate cassette having ter substitution (pLOGIC046) or the tesB substitution (ptb-buk deletion), demonstrating that the tesB substituted strain has greater butyrate production.

[0042] FIG. 13 depicts a graph of butyrate production using different butyrate-producing circuits comprising a nuoB gene deletion. Strains depicted are BW25113 comprising a bcd-butyrate cassette, with or without a nuoB deletion, and BW25113 comprising a ter-butyrate cassette, with or without a nuoB deletion. Strains with deletion are labeled with nuoB. The NuoB gene deletion results in greater levels of butyrate production as compared to a wild-type parent control in butyrate producing strains. NuoB is a main protein complex involved in the oxidation of NADH during respiratory growth. In some embodiments, preventing the coupling of NADH oxidation to electron transport increases the amount of NADH being used to support butyrate production.

[0043] FIG. 14A, FIG. 14B, FIG. 14C, and FIG. 14D depict schematics and graphs showing butyrate or biomarker production of a butyrate producing circuit under the control of an FNR promoter. FIG. 14A depicts a schematic showing a butyrate producing circuit under the control of an FNR promoter. FIG. 14B depicts a bar graph of anaerobic induction of butyrate production. FNR-responsive promoters were fused to butyrate cassettes containing either the bcd or ter circuits. Transformed cells were grown in LB to early log and placed in anaerobic chamber for 4 hours to induce expression of butyrate genes. Cells were washed and resuspended in minimal media w/l 0.5% glucose and incubated microaerobically to monitor butyrate production over time. SYN-501 led to significant butyrate production under anaerobic conditions. FIG. 14C depicts SYN-501 in the presence and absence of glucose and oxygen in vitro. SYN-501 comprises pSC101 PydfZ-ter butyrate plasmid; SYN-500 comprises pSC101 PydfZ-bcd butyrate plasmid; SYN-506 comprises pSC101 nirB-bcd butyrate plasmid. FIG. 14D depict levels of mouse lipocalin 2 (left) and calprotectin (right) quantified by ELISA using the fecal samples in an in vivo model. SYN-50 reduces inflammation and/or protects gut barrier function as compared to wild type Nissle control.

[0044] FIG. 15 depicts a graph measuring gut-barrier function in dextran sodium sulfate (DSS)-induced mouse models of IBD. The amount of FITC dextran found in the plasma of mice administered different concentrations of DSS was measured as an indicator of gut barrier function.

[0045] FIG. 16 depicts serum levels of FITC-dextran analyzed by spectrophotometry. FITC-dextran is a readout for gut barrier function in the DSS-induced mouse model of IBD.

[0046] FIG. 17 depicts a scatter graph of butyrate concentrations in the feces of mice gavaged with either H2O, 100 mM butyrate in H20, streptomycin resistant Nissle control or SYN501 comprising a PydfZ-ter→pbt-buk butyrate plasmid. Significantly greater levels of butyrate were detected in the feces of the mice gavaged with SYN501 as compared mice gavaged with the Nissle control or those given water only. Levels are close to 2 mM and higher than the levels seen in the mice fed with H20 (+) 200 mM butyrate.

[0047] FIG. 18 depicts a bar graph comparing butyrate concentrations produced in vitro by the butyrate cassette plasmid strain SYN501 as compared to Clostridia butyricum MIYARISAN (a Japanese probiotic strain), Clostridium tyrobutyricum VPI 5392 (Type Strain), and Clostridium butyricum NCTC 7423 (Type Strain) under aerobic and anaerobic conditions at the indicated timepoints. The Nissle strain comprising the butyrate cassette produces butyrate levels comparable to Clostridium spp. in RCM media.

[0048] FIG. 19A depicts a bar graph showing butyrate concentrations produced in vitro by strains comprising chromsolmally integrated butyrate copies as compared to plasmid copies. Integrated butyrate strains, SYN1001 and SYN1002 (both integrated at the agaI/rsmI locus) gave comparable butyrate production to the plasmid strain SYN501.

[0049] FIG. 19B and FIG. 19C depict bar graphs showing the effect of the supernatants from the engineered butyrate-producing strain, SYN1001, on alkaline phosphatase activity in HT-29 cells represented in bar (FIG. 19B) and nonlinear fit (FIG. 19C) graphical formats.

[0050] FIG. 20A and FIG. 20B depicts the construction and gene organization of an exemplary plasmids. FIG. 20A depicts the construction and gene organization of an exemplary plasmids comprising a gene encoding NsrR, a regulatory sequence from norB, and a butyrogenic gene cassette (pLogic031-nsrR-norB-butyrate construct). FIG. 20B depicts the construction and gene organization of another exemplary plasmid comprising a gene encoding NsrR, a regulatory sequence from norB, and a butyrogenic gene cassette (pLogic046-nsrR-norB-butyrogenic gene cassette).

[0051] FIG. 21 depicts butyrate production using SYN001+tet (control wild-type Nissle comprising no plasmid), SYN067+tet (Nissle comprising the pLOGIC031 ATC-inducible butyrate plasmid), and SYN080+tet (Nissle comprising the pLOGIC046 ATC-inducible butyrate plasmid).

[0052] FIG. 22 depicts butyrate production by genetically engineered Nissle comprising the pLogic031-nsrR-norB-butyrate construct (SYN133) or the pLogic046-nsrR-norB-butyrate construct (SYN145), which produce more butyrate as compared to wild-type Nissle (SYN001).

[0053] FIG. 23 depicts the construction and gene organization of an exemplary plasmid comprising an oxyS promoter and butyrogenic gene cassette (pLogic031-oxyS-butyrogenic gene cassette).

[0054] FIG. 24 depicts the construction and gene organization of another exemplary plasmid comprising an oxyS promoter and butyrogenic gene cassette (pLogic046-oxyS-butyrogenic gene cassette).

[0055] FIG. 25 depicts a schematic illustrating a strategy for increasing butyrate and acetate production in engineered bacteria. Aerobic metabolism through the citric acid cycle (TCA cycle) (crossed out) is inactive in the anaerobic environment of the colon. E. coli makes high levels of acetate as an end production of fermentation. To improve acetate production, while still maintaining highlevels of butyrate production, targeted deletion can be introduced to prevent the production of unnecessary metabolic fermentative byproducts (thereby simultaneously increasing butyrate and acetate production). Non-limiting examples of competing routes (shown in in rounded boxes) are frdA (converts phosphoenolpyruvate to succinate), ldhA (converts pyruvate to lactate) and adhE (converts Acetyl-CoA to Ethanol). Deletions of interest therefore include deletion of adhE, ldh, and frd. Thus, in certain embodiments, the genetically engineered bacteria further comprise mutations and/or deletions in one or more of frdA, ldhA, and adhE.

[0056] FIG. 26A and FIG. 26B depict line graphs showing acetate production over a 6 hour time course post-induction in 0.5% glucose MOPS (pH6.8) (FIG. 26A) and in 0.5% glucuronic acid MOPS (pH6.3) (FIG. 26B). Acetate production of an engineered E. coli Nissle strain comprising a deletion in the endenous ldh gene (SYN2001) was compared with streptomycin resistant Nissle (SYN94).

[0057] FIG. 26C and FIG. 26D depict bar graphs showing acetate and butyrate production in 0.5% glucose MOPS (pH6.8) (FIG. 26C) and acetate and butyrate production in 0.5% glucuronic acid MOPS (pH6.3) (FIG. 26D). Deletions in endogenous adhE (Aldehyde-alcohol dehydrogenase) and ldh (lactate dehydrogenase) were introduced into Nissle strains with either integrated FNRS ter-tesB or FNRS-ter-pbt-buk butyrate cassettes. SYN2006 comprises a FNRS ter-tesB cassette integrated at the HA1/2 locus and a deletion in the endogenous adhE gene. SYN2007 comprises a FNRS ter-tesB cassette integrated at the HA1/2 locus and a deletion in the endogenous ldhA gene. SYN2008 comprises a FNRS-ter-pbt-buk butyrate cassette and a deletion in the endogenous adhE gene. SYN2003 comprises a FNRS-ter-pbt-buk butyrate cassette and a deletion in the endogenous ldhA gene.

[0058] FIG. 26E depicts a bar graph showing acetate and butyrate production at the indicated time points post induction in 0.5% glucose MOPS (pH6.8). A strain comprising a FNRS-ter-tesB butyrate cassette integrated at the HA1/2 locus of the chromosome (SYN1004) was compared with a strain comprising the same integrated cassette and additionally a deletion in the endogenous frd gene (SYN2005).

[0059] FIG. 26F depicts a bar graph showing acetate and butyrate production at 18 hours in 0.5% glucose MOPS (pH6.8), comparing three strains engineered to produce short chain fatty acids. SYN2001 comprises a deletion in the endenous ldh gene; SYN2002 comprises a FNRS-ter-tesB butyrate cassette integrated at the HA1/2 locus and deletions in the endogenous adhE and pta genes. SYN2003 comprises FNRS-ter-pbt-buk butyrate cassette integrated at the HA1/2 locus and a deletion in the endogenous ldhA gene.

[0060] FIG. 26G and FIG. 26H depict line graphs showing the effect of supernatants from the engineered acetate-producing strain, SYN2001, on LPS-induced IFNγ secretion in primary human PBMC cells from donor 1 (D1) (FIG. 26G) and donor 2 (D2) (FIG. 26H).

[0061] FIG. 27 depicts a schematic of an exemplary propionate biosynthesis gene cassette.

[0062] FIG. 28 depicts a schematic of a construct comprising the sleeping beauty mutase operon from E. coli under the control of a heterologous FnrS promoter.

[0063] FIG. 29 depicts a bar graph of proprionate concentrations produced in vitro by the wild type E. coli BW25113 strain and a BW25113 strain which comprises the endogenous SBM operon under the control of the FnrS promoter, as depicted in the schematic in FIG. 28.

[0064] FIG. 30A, FIG. 30B, and FIG. 30C depict schematics of the gene organization of exemplary circuits of the disclosure for the expression of therapeutic polypeptides, which are secreted using components of the flagellar type III secretion system. A therapeutic polypeptide of interest, such as, GLP-2, IL-10, and IL-22, is assembled behind a fliC-5′UTR, and is driven by the native fliC and/or fliD promoter (FIG. 30A and FIG. 30B) or a tet-inducible promoter (FIG. 30C). In alternate embodiments, an inducible promoter such as oxygen level-dependent promoters (e.g., FNR-inducible promoter), promoters induced by IBD specific molecules or promoters induced by inflammation or an inflammatory response (RNS, ROS promoters), and promoters induced by a metabolite that may or may not be naturally present (e.g., can be exogenously added) in the gut, e.g., arabinose can be used. The therapeutic polypeptide of interest is either expressed from a plasmid (e.g., a medium copy plasmid) or integrated into fliC loci (thereby deleting all or a portion of fliC and/or fliD). Optionally, an N terminal part of FliC is included in the construct, as shown in FIG. 30B and FIG. 30D.

[0065] FIG. 31A and FIG. 31B depict schematics of the gene organization of exemplary circuits of the disclosure for the expression of therapeutic polypeptides, which are secreted via a diffusible outer membrane (DOM) system. The therapeutic polypeptide of interest is fused to a prototypical N-terminal Sec-dependent secretion signal or Tat-dependent secretion signal, which is is cleaved upon secretion into the periplasmic space. Exemplary secretion tags include sec-dependent PhoA, OmpF, OmpA, cvaC, and Tat-dependent tags (TorA, FdnG, DmsA). In certain embodiments, the genetically engineered bacteria comprise deletions in one or more of lpp, pal, tolA, and/or nlpI. Optionally, periplasmic proteases are also deleted, including, but not limited to, degP and ompT, e.g., to increase stability of the polypeptide in the periplasm. A FRT-KanR-FRT cassette is used for downstream integration. Expression is driven by a tet promoter (FIG. 31A) or an inducible promoter, such as oxygen level-dependent promoters (e.g., FNR-inducible promoter, FIG. 31B), promoters induced by IBD specific molecules or promoters induced by inflammation or an inflammatory response (RNS, ROS promoters), and promoters induced by a metabolite that may or may not be naturally present (e.g., can be exogenously added) in the gut, e.g., arabinose.

[0066] FIG. 32A, FIG. 32B, FIG. 32C, FIG. 32D, and FIG. 32E depict schematics of non-limiting examples of constructs for the expression of GLP2 for bacterial secretion. FIG. 32A depicts a schematic of a human GLP2 construct inserted into the FliC locus, under the control of the native FliC promoter. FIG. 32B depicts a schematic of a human GLP2 construct, including the N terminal 20 amino acids of FliC, inserted into the FliC locus under the control of the native FliC promoter. FIG. 32C depicts a schematic of a human GLP2 construct, including the N-terminal 20 amino acids of FliC, inserted into the FliC locus under the control of a tet inducible promoter. FIG. 32D depicts a schematic of a human GLP2 construct with a N terminal OmpF secretion tag (sec-dependent secretion system) under the control of a tet inducible promoter. FIG. 32E depicts a schematic of a human GLP2 construct with a N terminal TorA secretion tag (tat secretion system) under the control of a tet inducible promoter.

[0067] FIG. 33A and FIG. 33B depict line graphs of ELISA results. FIG. 33A depicts a line graph, showing an phopho-STAT3 (Tyr705) ELISA conducted on extracts from serum-starved Colo205 cells treated with supernatants from engineered bacteria comprising a PAL deletion and an integrated construct encoding hIL-22 with a phoA secretion tag. The data demonstrate that hIL-22 secreted from the engineered bacteria is functionally active. FIG. 33B depicts a line graph, showing an phopho-STAT3 (Tyr705) ELISA showing a antibody completion assay. Extracts from Colo205 cells were treated with the bacterial supernatants from the IL-22 overexpressing strain preincubated with increasing concentrations of neutralizing anti-IL-22 antibody. The data demonstrated that phospho-Stat3 signal induced by the secreted hIL-22 is competed away by the hIL-22 antibody MAB7821.

[0068] FIG. 33C depicts a line graph showing SYN3001 (PhoA-IL-22 in pal mutant chassi), but not SYN3000 (pal mutant chassi) supernatant induces STAT3 activation.

[0069] FIG. 33D depicts a line graph showing that anti IL-22 neutralizing antibody inhibits SYN3001-induced STAT3 activation (n=3).

[0070] FIG. 33E depicts a Western blot analysis of bacterial supernatants from strain SYN2980 and SYN2982, using IL-10 antibody (IL-10 (D13A11) XP® Rabbit mAb #12163, Cell Signaling Technology). The secreted polypeptide has the same molecular weight as the standards, indicating that the signal sequence is cleaved from the native peptide.

[0071] FIG. 34 depicts a schematic of tryptophan metabolism along the kynurenine and the serotonin arms in humans. The abbreviations for the enzymes are as follows: 3-HAO: 3-hydroxyl-anthranilate 3,4-dioxidase: AAAD: aromatic-amino acid decarboxylase; ACMSD, alpha-amino-beta-carboxymuconate-epsilon-semialdehyde decarboxylase; HIOMT, hydroxyl-O-methyltransferase; IDO, indoleamine 2,3-dioxygenase; KAT, kynurenine amino transferases I-III; KMO: kynurenine 3-monooxygenase; KYNU, kynureninase; NAT, N-acetyltransferase; TDO, tryptophan 2,3-dioxygenase; TPH, tryptophan hydroxylase; QPRT, quinolinic acid phosphoribosyl transferase.

[0072] FIG. 35 depicts a schematic of bacterial tryptophan catabolism machinery, which is genetically and functionally homologous to IDO1 enzymatic activity, as described in Vujkovic-Cvijin et al., Dysbiosis of the gut microbiota is associated with HIV disease progression and tryptophan catabolism; Sci Transl Med. 2013 Jul. 10; 5(193): 193ra91, the contents of which is herein incorporated by reference in its entirety. In certain embodiments of the disclosure, the genetically engineered bacteria comprise gene cassettes comprising one or more of the bacterial tryptophan metabolism enzymes depicted in FIG. 35. In certain embodiments, the genetically engineered bacteria comprise one or more gene cassettes which produce one or more of the metabolites depicted in FIG. 35, including but not limited to, kynurenine, indole-3-aldehyde, indole-3-acetic acid, and/or indole-3 acetaldehyde.

[0073] FIG. 36A and FIG. 36B depict schematics of indole metabolite mode of action (FIG. 36A) and indole biosynthesis (FIG. 36B). FIG. 36A depicts a schematic of molecular mechanisms of action of indole and its metabolites on host physiology and disease. Tryptophan catabolized by bacteria to yield indole and other indole metabolites, e.g., Indole-3-propionate (IPA) and Indole-3-aldehyde (13A), in the gut lumen. IPA acts on intestinal cells via pregnane X receptors (PXR) to maintain mucosal homeostasis and barrier function. 13A acts on the aryl hydrocarbon receptor (AhR) found on intestinal immune cells and promotes IL-22 production. Activation of AhR plays a crucial role in gut immunity, such as in maintaining the epithelial barrier function and promoting immune tolerance to promote microbial commensalism while protecting against pathogenic infections. Indole has a number of roles, such as a signaling molecule to intestinal L cells to produce glucagon-like protein 1 (GLP-1) or as a ligand for AhR (Zhang et al. Genome Med. 2016; 8: 46). FIG. 36B depicts a schematic of the trypophan catabolic pathway/indole biosynthesis pathways. Host and microbiota metabolites with AhR agonistic activity are in in diamond and circled, respectively (see, e.g., Lamas et al., CARD9 impacts colitis by altering gut microbiota metabolism of tryptophan into aryl hydrocarbon receptor ligands; Nature Medicine 22, 598-605 (2016). In certain embodiments of the disclosure, the genetically engineered bacteria comprise gene cassettes comprising one or more of the bacterial tryptophan metabolism enzymes which catalyze the reactions shown in FIGS. 36A and 36B. In certain embodiments, the genetically engineered bacteria comprise one or more gene cassettes which produce one or more of the metabolites depicted in FIGS. 36A and 36B, including but not limited to, kynurenine, indole-3-aldehyde, indole-3-acetic acid, and/or indole-3 acetaldehyde.

[0074] FIG. 37A and FIG. 37B depict diagrams of bacterial tryptophan metabolism pathways. FIG. 37A depicts a schematic of the bacterial tryptophan metabolism, as described, e.g., in Enzymes are numbered as follows 1) Trp 2,3 dioxygenase (EC 1.13.11.11); 2) kynurenine formidase (EC 3.5.1.49); 3) kynureninase (EC 3.7.1.3); 4) tryptophanase (EC 4.1.99.1); 5) Trp aminotransferase (EC 2.6.1.27); 6) indole lactate dehydrogenase (EC1.1.1.110); 7) Trp decarboxylase (EC 4.1.1.28); 8) tryptamine oxidase (EC 1.4.3.4); 9) Trp side chain oxidase (EC 4.1.1.43); 10) indole acetaldehyde dehydrogenase (EC 1.2.1.3); 11) indole acetic acid oxidase; 13) Trp 2-monooxygenase (EC 1.13.12.3); and 14) indole acetamide hydrolase (EC 3.5.1.0). The dotted lines (-) indicate a spontaneous reaction. FIG. 37B Depicts a schematic of tryptophan derived pathways. Known AHR agonists are with asterisk. Abbreviations are as follows. Trp: Tryptophan; TrA: Tryptamine; IAAld: Indole-3-acetaldehyde: IAA: Indole-3-acetic acid; FICZ: 6-formylindolo(3,2-b)carbazole; IPyA: Indole-3-pyruvic acid; IAM: Indole-3-acetamine; IAOx: Indole-3-acetaldoxime; IAN: Indole-3-acetonitrile; N-formyl Kyn: N-formylkynurenine; Kyn:Kynurenine; KynA: Kynurenic acid; 13C: Indole-3-carbinol; IAld: Indole-3-aldehyde; DIM: 3,3′-Diindolylmethane; ICZ: Indolo(3,2-b)carbazole. Enzymes are numbered as follows: I. EC 1.13.11.11 (Tdo2, Bna2), EC 1.13.11.11 (ldo1); 2. EC 4.1.1.28 (Tdc); 3. EC 1.4.3.22, EC 1.4.3.4 (TynA); 4. EC 1.2.1.3 (lad1), EC 1.2.3.7 (Aao1); 5. EC 3.5.1.9 (Afmid Bna3); 6. EC 2.6.1.7 (Cclb1, Cclb2, Aadat, Got2); 7. EC 1.4.99.1 (TnaA); 8. EC 1.14.13.125 (CYP79B2, CYP79B3); 9. EC 1.4.3.2 (StaO), EC 2.6.1.27 (Aro9, aspC), EC 2.6.1.99 (Taa1), EC 1.4.1.19 (TrpDH); 10. EC 1.13.12.3 (laaM); 11. EC 4.1.1.74 (lpdC); 12. EC 1.14.13.168 (Yuc2); 13. EC 3.5.1.4 (laaH); 14. EC 3.5.5.1. (Nit1); 15. EC 4.2.1.84 (Nit1); 16. EC 4.99.1.6 (CYP71A13); 17. EC 3.2.1.147 (Pen2). In certain embodiments of the disclosure, the genetically engineered bacteria comprise gene cassettes comprising one or more of the bacterial tryptophan metabolism enzymes depicted in FIGS. 37A and 37B. In certain embodiments, the genetically engineered bacteria comprise one or more gene cassettes which produce one or more of the metabolites depicted in FIGS. 37A and 37B. In certain embodiments, the one or more cassettes are on a plasmid; in other embodiments, the cassettes are integrated into the genome. In certain embodiments the one or more cassettes are under the control of inducible promoters which are induced under low-oxygen conditions, in the presence of certain molecules or metabolites, in the presence of molecules or metabolites associated with inflammation or an inflammatory response, or in the presence of some other metabolite that may or may not be present in the gut, such as arabinose.

[0075] FIG. 38 depicts a schematic of the E. coli tryptophan synthesis pathway. In Escherichia coli, tryptophan is biosynthesized from chorismate, the principal common precursor of the aromatic amino acids tryptophan, tyrosine and phenylalanine, as well as the essential compounds tetrahydrofolate, ubiquinone-8, menaquinone-8 and enterobactin (enterochelin), as shown in the superpathway of chorismate metabolism. Five genes encode five enzymes that catalyze tryptophan biosynthesis from chorismate. The five genes trpE trpD trpC trpB trpA form a single transcription unit, the trp operon. A weak internal promoter also exists within the trpD structural gene that provides low, constitutive levels of mRNA.

[0076] FIG. 39 depicts one embodiment of the disclosure in which the E. coli TRP synthesis enzymes are expressed from a construct under the control of a tetracycline inducible system.

[0077] FIG. 40A, FIG. 40B, FIG. 40C, and FIG. 40D depicts schematics of exemplary embodiments of the disclosure, in which the genetically engineered bacteria comprise circuits for the production of tryptophan. Any of the gene(s), gene sequence(s) and/or gene circuit(s) or cassette(s) are optionally expressed from an inducible promoter. In certain embodiments the one or more cassettes are under the control of constitutive promoters. Exemplary inducible promoters which may control the expression of the gene(s), gene sequence(s) and/or gene circuit(s) or cassette(s) include oxygen level-dependent promoters (e.g., FNR-inducible promoter), promoters induced by inflammation or an inflammatory response (RNS, ROS promoters), and promoters induced by a metabolite that may or may not be naturally present (e.g., can be exogenously added) in the gut, e.g., arabinose and tetracycline. The bacteria may also include an auxotrophy, e.g., deletion of thyA (Δ thyA: thymidine dependence). FIG. 40A shows a schematic depicting an exemplary Tryptophan circuit. Tryptophan is produced from its precursor, chorismate, through expression of the trpE, trpG-D (also referred to as trpD), trpC-F (also referred to as trpC), trpB and trpA genes. Optional knockout of the tryptophan repressor trpR is also depicted. Optional production of chorismate through expression of aroG/F/H and aroB, aroD, aroE, aroK and aroC genes is also shown. The bacteria may optionally also include gene sequence(s) for the expression of YddG, which functions as a tryptophan exporter. The bacteria may optionally also comprise one or more gene sequence(s) depicted or described in FIG. 40B, and/or FIG. 40C, and/or FIG. 40D. FIG. 40B depicts a tryptophan producing strain, in which tryptophan is produced from the chorismate precursor through expression of the trpE, trpG-D, trpC-F, trpB and trpA genes. AroG and TrpE are replaced with feedback resistant versions to improve tryptophan production. Optionally, bacteria may comprise any of the transporters and/or additional tryptophan circuits depicted in FIG. 40A and/or described in the description of FIG. 40A. The bacteria may optionally also comprise one or more gene sequence(s) depicted or described in FIG. 40C, and/or FIG. 40D. Optionally, trpR and/or the tnaA gene (encoding a tryptophanase converting tryptophan into indole) are deleted to further increase levels of tryptophan produced. FIG. 40C depicts a tryptophan producing strain, in which tryptophan is produced from the chorismate precursor through expression of the trpE, trpG-D, trpC-F, trpB and trpA genes. AroG and TrpE are replaced with feedback resistant versions to improve tryptophan production. The strain further comprises either a wild type or a feedback resistant SerA gene. Escherichia coli serA-encoded 3-phosphoglycerate (3PG) dehydrogenase catalyzes the first step of the major phosphorylated pathway of L-serine (Ser) biosynthesis. This step is an oxidation of 3PG to 3-phosphohydroxypyruvate (3PHP) with the concomitant reduction of NADI to NADH. E. coli uses one serine for each tryptophan produced. As a result, by expressing serA, tryptophan production is improved. Optionally, bacteria may comprise any of the transporters and/or additional tryptophan circuits depicted in FIG. 40A and/or described in the description of FIG. 40A. The bacteria may optionally also comprise one or more gene sequence(s) depicted or described in FIG. 40B, and/or FIG. 40D. Optionally, Trp Repressor and/or the tnaA gene are deleted to further increase levels of tryptophan produced. The bacteria may optionally also include gene sequence(s) for the expression of YddG, which functions as a tryptophan exporter. FIG. 40D depicts a non-limiting example of a tryptophan producing strain, in which tryptophan is produced from the chorismate precursor through expression of the trpE, trpG-D, trpC-F, trpB and trpA genes. AroG and TrpE are replaced with feedback resistant versions to improve tryptophan production. The strain further optionally comprises either a wild type or a feedback resistant SerA gene. Optionally, bacteria may comprise any of the transporters and/or additional tryptophan circuits depicted in FIG. 40A and/or described in the description of FIG. 40A. The bacteria may optionally also comprise one or more gene sequence(s) depicted or described in FIG. 40B, and/or FIG. 40C. Optionally, Trp Repressor and/or the tnaA gene are deleted to further increase levels of tryptophan produced. The bacteria may optionally also include gene sequence(s) for the expression of YddG, which functions as a tryptophan exporter. Optionally, the bacteria may also comprise a deletion in PheA, which prevents conversion of chorismate into phenylalanine and thereby promotes the production of anthranilate and tryptophan.

[0078] FIG. 41A, FIG. 41B, FIG. 41D, FIG. 41D, FIG. 41E, FIG. 41F, FIG. 41G, and FIG. 41H depict schematics of non-limiting examples of embodiments of the disclosure. In all embodiments, optionally gene(s) which encode exporters may also be included. FIG. 41A depicts one embodiment of the disclosure, in which the genetically engineered bacteria produce tryptamine from tryptophan. In certain embodiments the one or more cassettes are under the control of inducible promoters. In certain embodiments the one or more cassettes are under the control of constitutive promoters. The bacteria may comprise any of the transporters and/or tryptophan circuits depicted and described in FIG. 40A and/or and/or FIG. 40B, and/or FIG. 40C, and/or FIG. 40D for the production of tryptophan. Alternatively, optionally, tryptophan can be imported through a transporter. In addition, the genetically engineered bacteria comprise a circuit for Tryptophan decarboxylase, e.g., from Catharanthus roseus, which converts tryptophan to tryptamine, e.g., under the control of an inducible promoter e.g., an FNR promoter. FIG. 41B depicts one embodiment of the disclosure, in which the genetically engineered bacteria produce indole-3-acetaldehyde and FICZ from tryptophan. The bacteria may comprise any of the transporters and/or tryptophan circuits depicted and described in FIG. 40A and/or FIG. 40B, and/or FIG. 40C, and/or FIG. 40D for the production of tryptophan. Alternatively, optionally, tryptophan can be imported through a transporter. In addition, the genetically engineered bacteria comprise a circuit for aro9 (L-tryptophan aminotransferase, e.g., from S. cerevisae) or aspC (aspartate aminotransferase, e.g., from E. coli, or taa1 (L-tryptophan-pyruvate aminotransferase, e.g., from Arabidopsis thaliana) or staO (L-tryptophan oxidase, e.g., from Streptomyces sp. TP-A0274) or trpDH (Tryptophan dehydrogenase, e.g., from Nostoc punctiforme NIES-2108) and ipdC (Indole-3-pyruvate decarboxylase, e.g., from Enterobacter cloacae) which together produce indole-3-acetaldehyde and FICZ from tryptophan, e.g., under the control of an inducible promoter e.g., an FNR promoter. FIG. 41C depicts one embodiment of the disclosure, in which the genetically engineered bacteria produce indole-3-acetaldehyde and FICZ from tryptophan. The bacteria may comprise any of the transporters and/or tryptophan circuits depicted and described in FIG. 40A and/or and/or FIG. 40B, and/or FIG. 40C, and/or FIG. 40D for the production of tryptophan. Alternatively, optionally, tryptophan can be imported through a transporter. In addition, the genetically engineered bacteria comprise a circuit comprising tdc (Tryptophan decarboxylase, e.g., from Catharanthus roseus and/or Clostridium sporogenes), and tynA (Monoamine oxidase, e.g., from E. coli), which converts tryptophan to indole-3-acetaldehyde and FICZ, e.g., under the control of an inducible promoter e.g., an FNR promoter. FIG. 41D depicts one embodiment of the disclosure, in which the genetically engineered bacteria produce indole-3-acetonitrile from tryptophan. The bacteria may comprise any of the transporters and/or tryptophan circuits depicted and described in FIG. 40A and/or and/or FIG. 40B, and/or FIG. 40C, and/or FIG. 40D for the production of tryptophan. Alternatively, optionally, tryptophan can be imported through a transporter. In addition, the genetically engineered bacteria comprise a circuit for cyp79B2, (tryptophan N-monooxygenase, e.g., from Arabidopsis thaliana) or cyp79B3 (tryptophan N-monooxygenase, e.g., from Arabidopsis thaliana), which together convert tryptophan to indole-3-acetonitrile, e.g., under the control of an inducible promoter e.g., an FNR promoter. FIG. 41E depicts one embodiment of the disclosure, in which the genetically engineered bacteria produce kynurenine from tryptophan. The bacteria may comprise any of the transporters and/or tryptophan circuits depicted and described in FIG. 40A and/or and/or FIG. 40B, and/or FIG. 40C, and/or FIG. 40D for the production of tryptophan. Alternatively, optionally, tryptophan can be imported through a transporter. In addition, the genetically engineered bacteria comprise a circuit comprising IDO1 (indoleamine 2,3-dioxygenase, e.g., from Homo sapiens or TDO2 (tryptophan 2,3-dioxygenase, e.g., from Homo sapiens) or BNA2 (indoleamine 2,3-dioxygenase, e.g., from S. cerevisiae) and Afmid: Kynurenine formamidase, e.g., from mouse) or BNA3 (kynurenine-oxoglutarate transaminase, e.g., from S. cerevisae) which together convert tryptophan to kynurenine, e.g., under the control of an inducible promoter e.g., an FNR promoter. FIG. 41F depicts one embodiment of the disclosure, in which the genetically engineered bacteria produce kynureninic acid from tryptophan. The bacteria may comprise any of the transporters and/or tryptophan circuits depicted and described in FIG. 40A and/or and/or FIG. 40B, and/or FIG. 40C, and/or FIG. 40D for the production of tryptophan. Alternatively, optionally, tryptophan can be imported through a transporter. In addition, the genetically engineered bacteria comprise a circuit comprising IDO1 (indoleamine 2,3-dioxygenase, e.g., from Homo sapiens or TDO2 (tryptophan 2,3-dioxygenase, e.g., from Homo sapiens) or BNA2 (indoleamine 2,3-dioxygenase, e.g., from S. cerevisiae) and Afmid: Kynurenine formamidase, e.g., from mouse) or BNA3 (kynurenine-oxoglutarate transaminase, e.g., from S. cerevisae) and GOT2 (Aspartate aminotransferase, mitochondrial, e.g., from Homo sapiens or AADAT (Kynurenine/alpha-aminoadipate aminotransferase, mitochondrial, e.g., from Homo sapiens), or CCLB1 (Kynurenine-oxoglutarate transaminase 1, e.g., from Homo sapiens) or CCLB2 (kynurenine-oxoglutarate transaminase 3, e.g., from Homo sapiens, which together produce kynureninic acid from tryptophan, under the control of an inducible promoter, e.g., an FNR promoter. FIG. 41G depicts one embodiment of the disclosure, in which the genetically engineered bacteria produce indole from tryptophan. The bacteria may comprise any of the transporters and/or tryptophan circuits depicted and described in FIG. 40A and/or and/or FIG. 40B, and/or FIG. 40C, and/or FIG. 40D for the production of tryptophan. Alternatively, optionally, tryptophan can be imported through a transporter. In addition, the genetically engineered bacteria comprise a circuit for tnaA (tryptophanase, e.g., from E. coli), which converts tryptophan to indole, e.g., under the control of an inducible promoter e.g., an FNR promoter. FIG. 41H depicts one embodiment of the disclosure, in which the genetically engineered bacteria produce indole-3-carbinol, indole-3-aldehyde, 3,3′ diindolylmethane (DIM), indolo(3,2-b) carbazole (ICZ) from indole glucosinolate taken up through the diet. The genetically engineered bacteria comprise a circuit comprising pne2 (myrosinase, e.g., from Arabidopsis thaliana) under the control of an inducible promoter, e.g. an FNR promoter. The engineered bacterium shown in any of FIG. 41A, FIG. 41B, FIG. 41D, FIG. 41D, FIG. 41E, FIG. 41F, FIG. 41G and FIG. 41H may also have an auxotrophy, e.g., in one example, the thyA gene can be been mutated in the E. coli Nissle genome, so thymidine must be supplied in the culture medium to support growth.

[0079] FIG. 42A, FIG. 42B, FIG. 42C, FIG. 42D, and FIG. 42E depict schematics of exemplary embodiments of the disclosure, in which the genetically engineered bacteria convert tryptophan into indole-3-acetic acid. In certain embodiments, the one or more cassettes are under the control of inducible promoters. In certain embodiments, the one or more cassettes are under the control of constitutive promoters. In FIG. 42A, the optional circuits for tryptophan production are as depicted and described in FIG. 40A. The strain optionally comprises additional circuits as depicted and/or described in FIG. 40B and/or FIG. 40C and/or FIG. 40D. Alternatively, optionally, tryptophan can be imported through a transporter. In addition, the genetically engineered bacteria comprise a circuit comprising aro9 (L-tryptophan aminotransferase, e.g., from S. cerevisae) or aspC (aspartate aminotransferase, e.g., from E. coli, or taa1 (L-tryptophan-pyruvate aminotransferase, e.g., from Arabidopsis thaliana) or staO (L-tryptophan oxidase, e.g., from Streptomyces sp. TP-A0274) or trpDH (Tryptophan dehydrogenase, e.g., from Nostoc punctiforme NIES-2108) and ipdC (Indole-3-pyruvate decarboxylase, e.g., from Enterobacter cloacae) and iad1 (Indole-3-acetaldehyde dehydrogenase, e.g., from Ustilago maydis) or AAO1 (Indole-3-acetaldehyde oxidase, e.g., from Arabidopsis thaliana) which together produce indole-3-acetic acid from tryptophan, e.g., under the control of an inducible promoter e.g., an FNR promoter. In FIG. 42B the optional circuits for tryptophan production are as depicted and described in FIG. 40A. The strain optionally comprises additional circuits as depicted and/or described in FIG. 40B and/or FIG. 40C and/or FIG. 40D. Alternatively, optionally, tryptophan can be imported through a transporter. In addition, the genetically engineered bacteria comprise a circuit comprising tdc (Tryptophan decarboxylase, e.g., from Catharanthus roseus and/or Clostridium sporogenes) ot tynA (Monoamine oxidase, e.g., from E. coli) and or iad1 (Indole-3-acetaldehyde dehydrogenase, e.g., from Ustilago maydis) or AAO1 (Indole-3-acetaldehyde oxidase, e.g., from Arabidopsis thaliana), e.g., under the control of an inducible promoter e.g., an FNR promoter. In FIG. 42C the optional circuits for tryptophan production are as depicted and described in FIG. 40A. The strain optionally comprises additional circuits as depicted and/or described in FIG. 40B and/or FIG. 40C and/or FIG. 40D. Alternatively, optionally, tryptophan can be imported through a transporter. In addition, the genetically engineered bacteria comprise a circuit comprising aro9 (L-tryptophan aminotransferase, e.g., from S. cerevisae) or aspC (aspartate aminotransferase, e.g., from E. coli, or taa1 (L-tryptophan-pyruvate aminotransferase, e.g., from Arabidopsis thaliana) or staO (L-tryptophan oxidase, e.g., from Streptomyces sp. TP-A0274) or trpDH (Tryptophan dehydrogenase, e.g., from Nostoc punctiforme NIES-2108) and yuc2 (indole-3-pyruvate monoxygenase, e.g., from Arabidopsis thaliana) e.g., under the control of an inducible promoter e.g., an FNR promoter. In FIG. 42D the optional circuits for tryptophan production are as depicted and described in FIG. 40A. The strain optionally comprises additional circuits as depicted and/or described in FIG. 40B and/or FIG. 40C and/or FIG. 40D. Alternatively, optionally, tryptophan can be imported through a transporter. In addition, the genetically engineered bacteria comprise a circuit comprising laaM (Tryptophan 2-monooxygenase e.g., from Pseudomonas savastanoi) and iaaH (Indoleacetamide hydrolase, e.g., from Pseudomonas savastanoi), e.g., under the control of an inducible promoter e.g., an FNR promoter. In FIG. 42E the optional circuits for tryptophan production are as depicted and described in FIG. 40A. The strain optionally comprises additional circuits as depicted and/or described in FIG. 40B and/or FIG. 40C and/or FIG. 40D. Alternatively, optionally, tryptophan can be imported through a transporter. In addition, the genetically engineered bacteria comprise a circuit comprising cyp79B2 (tryptophan N-monooxygenase, e.g., from Arabidopsis thaliana) or cyp79B3 (tryptophan N-monooxygenase, e.g., from Arabidopsis thaliana and cyp71a13 (indoleacetaldoxime dehydratase, e.g., from Arabidopsis thaliana) and nit1 (Nitrilase, e.g., from Arabidopsis thaliana) and iaaH (Indoleacetamide hydrolase, e.g., from Pseudomonas savastanoi), e.g., under the control of an inducible promoter e.g., an FNR promoter. the engineered bacterium shown in any of FIG. 42A, FIG. 42B, FIG. 42C, FIG. 42D, and FIG. 42E may also have an auxotrophy, e.g., in one example, the thyA gene can be been mutated in the E. coli Nissle genome, so thymidine must be supplied in the culture medium to support growth.

[0080] In FIG. 42F the optional circuits for tryptophan production are as depicted and described in FIG. 40A. The strain optionally comprises additional circuits as depicted and/or described in FIG. 40B and/or FIG. 40C and/or FIG. 40D. Alternatively, optionally, tryptophan can be imported through a transporter. Additionally, the strain comprises trpDH (Tryptophan dehydrogenase, e.g., from Nostoc punctiforme NIES-2108) and ipdC (Indole-3-pyruvate decarboxylase, e.g., from Enterobacter cloacae) which together produce indole-3-acetaldehyde and FICZ though an (indol-3yl)pyruvate intermediate, and iad1 (Indole-3-acetaldehyde dehydrogenase, e.g., from Ustilago maydis), which converts indole-3-acetaldehyde into indole-3-acetate.

[0081] FIG. 43A, FIG. 43B, and FIG. 43C depict schematics of exemplary embodiments of the disclosure, in which the genetically engineered bacteria comprise circuits for the production of tryptophan, tryptamine, indole acetic acid, and indole propionic acid. Any of the gene(s), gene sequence(s) and/or gene circuit(s) or cassette(s) are optionally expressed from an inducible promoter. In certain embodiments, the one or more cassettes are under the control of constitutive promoters. Exemplary inducible promoters which may control the expression of the gene(s), gene sequence(s) and/or gene circuit(s) or cassette(s) include oxygen level-dependent promoters (e.g., FNR-inducible promoter), promoters induced by inflammation or an inflammatory response (RNS, ROS promoters), and promoters induced by a metabolite that may or may not be naturally present (e.g., can be exogenously added) in the gut, e.g., arabinose and tetracycline. The bacteria may also include an auxotrophy, e.g., deletion of thyA (A thyA; thymidine dependence). FIG. 43A a depicts non-limiting example of a tryptamine producing strain. Tryptophan is optionally produced from chorismate precursor, and the strain optionally comprises circuits as depicted and/or described in FIG. 40A and/or FIG. 40B and/or FIG. 40C and/or FIG. 40D. Additionally, the strain comprises tdc (tryptophan decarboxylase, e.g., from Catharanthus roseus and/or Clostridium sporogenes), which converts tryptophan into tryptamine. FIG. 43B depicts a non-limiting example of an indole-3-acetate producing strain. Tryptophan is optionally produced from chorismate precursor, and the strain optionally comprises circuits as depicted and/or described in FIG. 40A and/or FIG. 40B and/or FIG. 40C and/or FIG. 40D. Additionally, the strain comprises trpDH (Tryptophan dehydrogenase, e.g., from Nostoc punctiforme NIES-2108) and ipdC (Indole-3-pyruvate decarboxylase, e.g., from Enterobacter cloacae) which together produce indole-3-acetaldehyde and FICZ though an (indol-3yl)pyruvate intermediate, and iad1 (Indole-3-acetaldehyde dehydrogenase, e.g., from Ustilago maydis), which converts indole-3-acetaldehyde into indole-3-acetate. FIG. 43C depicts a non-limiting example of an indole-3-propionate-producing strain. Tryptophan is optionally produced from chorismate precursor, and the strain optionally comprises circuits as depicted and/or described in FIG. 40A and/or FIG. 40B and/or FIG. 40C and/or FIG. 40D. Additionally, the strain comprises a circuit as described in FIG. 48, comprising trpDH (Tryptophan dehydrogenase, e.g., from Nostoc punctiforme NIES-2108, which produces (indol-3yl)pyruvate from tryptophan), fldA (indole-3-propionyl-CoA:indole-3-lactate CoA transferase, e.g., from Clostridium sporogenes, which converts converts indole-3-lactate and indol-3-propionyl-CoA to indole-3-propionic acid and indole-3-lactate-CoA), fldB and fldC (indole-3-lactate dehydratase e.g., from Clostridium sporogenes, which converts indole-3-lactate-CoA to indole-3-acrylyl-CoA) fldD and/or AcuI: (indole-3-acrylyl-CoA reductase, e.g., from Clostridium sporogenes and/or acrylyl-CoA reductase, e.g., from Rhodobacter sphaeroides, which convert indole-3-acrylyl-CoA to indole-3-propionyl-CoA). The circuits further comprise fldH1 and/or fldH2 (indole-3-lactate dehydrogenase 1 and/or 2, e.g., from Clostridium sporogenes), which converts (indol-3-yl)pyruvate into indole-3-lactate).

[0082] FIG. 44A and FIG. 44B depict schematics showing exemplary engineering strategies which can be employed for tryptophan production. FIG. 44A depicts a schematic showing intermediates in tryptophan biosynthesis and the gene products catalyzing the production of these intermediates. Phosphoenolpyruvate (PEP) and D-erythrose 4-phosphate (E4P) are used to generate 3-deoxy-D-arabino-heptulosonate 7-phosphate (DAHP). DHAP is catabolized to chorismate and then anthranilate, which is converted to tryptophan (Trp) by the tryptophan operon. Alternatively, chorismate can be used in the synthesis of tyrosine (Tyr) and/or phenylalanine (Phe). In the serine biosynthesis pathway, D-3-phosphoglycerate is converted to serine, which can also be a source for tryptophan biosynthesis. AroG, AroF, AroH: DAHP synthase catalyzes an aldol reaction between phosphoenolpyruvate and D-erythrose 4-phosphate to generate 3-deoxy-D-arabino-heptulosonate 7-phosphate (DAHP). There are three isozymes of DAHP synthase, each specifically feedback regulated by tyrosine (AroF), phenylalanine (AroG) or tryptophan (AroH). AroB: Dehydroquinate synthase (DHQ synthase) is involved in the second step of the chorismate pathway, which leads to the biosynthesis of aromatic amino acids. DHQ synthase catalyzes the cyclization of 3-deoxy-D-arabino-heptulosonic acid 7-phosphate (DAHP) to dehydroquinate (DHQ). AroD: 3-Dehydroquinate dehydratase (DHQ dehydratase) is involved in the 3rd step of the chorismate pathway, which leads to the biosynthesis of aromatic amino acids. DHQ dehydratase catalyzes the conversion of DHQ to 3-dehydroshikimate and introduces the first double bond of the aromatic ring. AroE, YdiB: E. coli expresses two shikimate dehydrogenase paralogs, AroE and YdiB. Shikimate dehydrogenase is involved in the 4th step of the chorismate pathway, which leads to the biosynthesis of aromatic amino acids. This enzyme converts 3-dehydroshikimate to shikimate by catalyzing the NADPH linked reduction of 3-dehydro-shikimate. AroL/AroK: Shikimate kinase is involved in the fifth step of the chorismate pathway, which leads to the biosynthesis of aromatic amino acids. Shikimate kinase catalyzes the formation of shikimate 3-phosphate from shikimate and ATP. There are two shikimate kinase enzymes, 1 (AroK) and II (AroL). AroA: 3-Phosphoshikimate-1-carboxyvinyltransferase (EPSP synthase) is involved in the 6th step of the chorismate pathway, which leads to the biosynthesis of aromatic amino acids. EPSP synthase catalyzes the transfer of the enolpyruvoyl moiety from phosphoenolpyruvate to the hydroxyl group of carbon 5 of shikimate 3-phosphate with the elimination of phosphate to produce 5-enolpyruvoyl shikimate 3-phosphate (EPSP). AroC: Chorismate synthase (AroC) is involved in the 7th and last step of the chorismate pathway, which leads to the biosynthesis of aromatic amino acids. This enzyme catalyzes the conversion of 5-enolpyruvylshikimate 3-phosphate into chorismate, which is the branch point compound that serves as the starting substrate for the three terminal pathways of aromatic amino acid biosynthesis. This reaction introduces a second double bond into the aromatic ring system. TrpEDCAB (E. coli trp operon): TrpE (anthranilate synthase) converts chorismate and L-glutamine into anthranilate, pyruvate and L-glutamate. Anthranilate phosphoribosyl transferase (TrpD) catalyzes the second step in the pathway of tryptophan biosynthesis. TrpD catalyzes a phosphoribosyltransferase reaction that generates N-(5′-phosphoribosyl)-anthranilate. The phosphoribosyl transferase and anthranilate synthase contributing portions of TrpD are present in different portions of the protein. Bifunctional phosphoribosylanthranilate isomerase/indole-3-glycerol phosphate synthase (TrpC) carries out the third and fourth steps in the tryptophan biosynthesis pathway. The phosphoribosylanthranilate isomerase activity of TrpC catalyzes the Amadori rearrangement of its substrate into carboxyphenylaminodeoxyribulose phosphate. The indole-glycerol phosphate synthase activity of TrpC catalyzes the ring closure of this product to yield indole-3-glycerol phosphate. The TrpA polypeptide (TSase α) functions as the a subunit of the tetrameric (α2-β2) tryptophan synthase complex. The TrpB polypeptide functions as the β subunit of the complex, which catalyzes the synthesis of L-tryptophan from indole and L-serine, also termed the β reaction. TnaA: Tryptophanase or tryptophan indole-lyase (TnaA) is a pyridoxal phosphate (PLP)-dependent enzyme that catalyzes the cleavage of L-tryptophan to indole, pyruvate and NH4+. PheA: Bifunctional chorismate mutase/prephenate dehydratase (PheA) carries out the shared first step in the parallel biosynthetic pathways for the aromatic amino acids tyrosine and phenylalanine, as well as the second step in phenylalanine biosynthesis. TyrA: Bifunctional chorismate mutase/prephenate dehydrogenase (TyrA) carries out the shared first step in the parallel biosynthetic pathways for the aromatic amino acids tyrosine and phenylalanine, as well as the second step in tyrosine biosynthesis. TyrB, ilvE, AspC: Tyrosine aminotransferase (TyrB), also known as aromatic-amino acid aminotransferase, is a broad-specificity enzyme that catalyzes the final step in tyrosine, leucine, and phenylalanine biosynthesis. TyrB catalyzes the transamination of 2-ketoisocaproate, p-hydroxyphenylpyruvate, and phenylpyruvate to yield leucine, tyrosine, and phenylalanine, respectively. TyrB overlaps with the catalytic activities of branched-chain amino-acid aminotransferase (IlvE), which also produces leucine, and aspartate aminotransferase, PLP-dependent (AspC), which also produces phenylalanine. SerA: D-3-phosphoglycerate dehydrogenase catalyzes the first committed step in the biosynthesis of L-serine. SerC: The serC-encoded enzyme, phosphoserine/phosphohydroxythreonine aminotransferase, functions in the biosythesis of both serine and pyridoxine, by using different substrates. Pyridoxal 5′-phosphate is a cofactor for both enzyme activities. SerB: Phosphoserine phosphatase catalyzes the last step in serine biosynthesis. Steps which are negatively regulated by the Trp Repressor (2), Tyr Repressor (1), or tyrosine (3), phenylalanine (4), or tryptophan (4) or positively regulated by trptophan (6) are indicated. FIG. 44B depicts a schematic showing exemplary engineering strategies which can improve tryptophan production. Each of these exemplary strategies can be used alone or two or more strategies can be combined to increase tryptophan production. Intervention points are in bold, italics and underlined. In one embodiment of the disclosure, bacteria are engineered to express a feedback resistant from of AroG (AroGfbr). In one embodiment, bacteria are engineered to express AroL. In one embodiment, bacteria are engineered to comprise one or more copies of a feedback resistant form of TrpE (TrpEfbr). In one embodiment, bacteria are engineered to comprise one or more additional copies of the Trp operon, e.g., TrpE, e.g. TrpEfbr, and/or TrpD, and/or TrpC, and/or TrpA, and/or TrpB. In one embodiment, endogenous TnaA is knocked out through mutation(s) and/or deletion(s). In one embodiment, bacteria are engineered to comprise one or more additional copies of SerA. In one embodiment, bacteria are engineered to comprise one or more additional copies of YddG, a tryptophan exporter. In one embodiment, endogenous PheA is knocked out through mutation(s) and/or deletion(s). In one embodiment, two or more of the strategies depicted in the schematic of FIG. 44B are engineered into a bacterial strain. Alternatively, other gene products in this pathway may be mutated or overexpressed.

[0083] FIG. 45A and FIG. 45B and FIG. 45C depict bar graphs showing tryptophan production by various engineered bacterial strains. FIG. 45A depicts a bar graph showing tryptophan production by various tryptophan producing strains. The data show expressing a feedback resistant form of AroG (AroG^{tbr}) is necessary to get tryptophan production. Additionally, using a feedback resistant trpE (trpE^{tbr}) has a positive effect on tryptophan production. FIG. 45B shows tryptophan production from a strain comprising a tet-trpE^{tbr}DCBA, tet-aroG^{tbr} construct, comparing glucose and glucuronate as carbon sources in the presence and absence of oxygen. It takes E. coli two molecules of phosphoenolpyruvate (PEP) to produce one molecule of tryptophan. When glucose is used as the carbon source, 50% of all available PEP is used to import glucose into the cell through the PTS system (Phosphotransferase system). Tryptophan production is improved by using a non-PTS sugar (glucuronate) aerobically. The data also show the positive effect of deleting tnaA (only at early time point aerobically). FIG. 45C depicts a bar graph showing improved tryptophan production by engineered strain comprising ΔtrpRΔtnaA, tet-trpE^{fbr} DCBA, tet-aroG^{fbr} through the addition of serine.

[0084] FIG. 46 depicts a bar graph showing a comparison in tryptophan production in strains SYN2126, SYN2323, SYN2339, SYN2473, and SYN2476. SYN2126 ΔtrpRΔtnaA. ΔtrpRΔtnaA, tet-aroGfbr. SYN2339 comprises ΔtrpRΔtnaA, tet-aroGfbr, tet-trpEfbrDCBA. SYN2473 comprises ΔtrpRΔtnaA, tet-aroGfbr-serA, tet-trpEfbrDCBA. SYN2476 comprises ΔtrpRΔtnaA, tet-trpEfbrDCBA. Results indicate that expressing aroG is not sufficient nor necessary under these conditions to get Trp production and that expressing serA is beneficial for tryptophan production.

[0085] FIG. 47 depicts a schematic of an indole-3-propionic acid (IPA) synthesis circuit. IPA produced by the gut microbiota has a significant positive effect on barrier integrity. IPA does not signal through AhR, but rather through a different receptor (PXR) (Venkatesh et al., Symbiotic Bacterial Metabolites Regulate Gastrointestinal Bardrier Function via the Xenobiotic Sensor PXR and Toll-like Receptor 4; Immunity 41, 296-310, Aug. 21, 2014). In some embodiments, IPA can be produced in a synthetic circuit by expressing two enzymes, a tryptophan ammonia lyase and an indole-3-acrylate reductase (e.g., Tryptophan ammonia lyase (WAL) (e.g., from Rubrivivax benzoatilyticus) and indole-3-acrylate reductase (e.g., from Clostridium botulinum). Tryptophan ammonia lyase converts tryptophan to indole-3-acrylic acid, and indole-3-acrylate reductase converts indole-3-acrylic acid into IPA. Without wishing to be bound by theory, no oxygen is needed for this reaction, allowing it to proceed under low or no oxygen conditions, e.g., as those found in the mammalian gut. In some embodiments, the genetically engineered bacteria further comprise one or more circuits for the production of tryptophan, e.g., as shown in FIG. 40 (A-D) and FIG. 44 and as described elsewhere herein. In some embodiments, AroG and/or TrpE are replaced with feedback resistant versions to improve tryptophan production in the genetically engineered bacteria. In some embodiments, trpR and/or the tnaA gene (encoding a tryptophanase converting tryptophan into indole) are deleted to further increase levels of tryptophan produced.

[0086] FIG. 48 depicts a schematic of indole-3-propionic acid (IPA), indole acetic acid (IAA), and tryptamine synthesis (TrA) circuits. Enzymes are as follows: 1. TrpDH: tryptophan dehydrogenase, e.g., from from Nostoc punctiforme NIES-2108; FldH1/FldH2: indole-3-lactate dehydrogenase, e.g., from Clostridium sporogenes; FldA: indole-3-propionyl-CoA:indole-3-lactate CoA transferase, e.g., from Clostridium sporogenes; FldBC: indole-3-lactate dehydratase, e.g., from Clostridium sporogenes; FldD: indole-3-acrylyl-CoA reductase, e.g., from Clostridium sporogenes; AcuI: acrylyl-CoA reductase, e.g., from Rhodobacter sphaeroides. lpdC: Indole-3-pyruvate decarboxylase, e.g., from Enterobacter cloacae; lad1: Indole-3-acetaldehyde dehydrogenase, e.g., from Ustilago maydis; Tdc: Tryptophan decarboxylase, e.g., from Catharanthus roseus or from Clostridium sporogenes.

[0087] Tryptophan dehydrogenase (EC 1.4.1.19) is an enzyme that catalyzes the reversible chemical reaction converting L-tryptophan, NAD(P) and water to (indol-3-yl)pyruvate (IPyA), NH3, NAD(P)H and H⁺. Indole-3-lactate dehydrogenase ((EC 1.1.1.110, e.g., Clostridium sporogenes or Lactobacillus casei) converts (indol-3yl)pyruvate (lpyA) and NADH and H+ to indole-3-lactate (ILA) and NAD+. Indole-3-propionyl-CoA:indole-3-lactate CoA transferase (FldA) converts indole-3-lactate (ILA) and indol-3-propionyl-CoA to indole-3-propionic acid (IPA) and indole-3-lactate-CoA. Indole-3-acrylyl-CoA reductase (FldD) and acrylyl-CoA reductase (AcuI) convert indole-3-acrylyl-CoA to indole-3-propionyl-CoA. Indole-3-lactate dehydratase (FldBC) converts indole-3-lactate-CoA to indole-3-acrylyl-CoA. Indole-3-pyruvate decarboxylase (lpdC:) converts Indole-3-pyruvic acid (IPyA) into Indole-3-acetaldehyde (IAAld) lad1: Indole-3-acetaldehyde dehydrogenase coverts Indole-3-acetaldehyde (IAAld) into Indole-3-acetic acid (IAA) Tdc: Tryptophan decarboxylase converts tryptophan (Trp) into tryptamine (TrA). In some embodiments, the genetically engineered bacteria further comprise one or more circuits for the production of tryptophan, e.g., as shown in FIG. 40 (A-D) and FIG. 44 and as described elsewhere herein. In some embodiments, AroG and/or TrpE are replaced with feedback resistant versions to improve tryptophan production in the genetically engineered bacteria. In some embodiments, trpR and/or the tnaA gene (encoding a tryptophanase converting tryptophan into indole) are deleted to further increase levels of tryptophan produced.

[0088] FIG. 49 depicts a bar graph showing tryptophan and indole acetic acid production for strains SYN2126, SYN2339 and SYN2342. SYN2126: comprises ΔtrpR and ΔtnaA (ΔtrpRΔtnaA). SYN2339 comprises circuitry for the production of tryptophan (ΔtrpRΔtnaA, tetR-Ptet-trpEfbrDCBA (pSC101), tetR-Ptet-aroGfbr (p15A)). SYN2342 comprises the same tryptophan production circuitry as the parental strain SYN2339, and additionally comprises ipdC-iad1 incorporated at the end of the second construct (ΔtrpRΔtnaA, tetR-Ptet-trpEfbrDCBA (pSC101), tetR-Ptet-aroGfbr-trpDH-ipdC-iad1 (p15A)). SYN2126 produced no tryptophan, SYN2339 produces increasing tryptophan over the time points measured, and SYN2342 converts all trypophan it produces into IAA.

[0089] FIG. 50 depicts a bar graph showing tryptophan and tryptamine production for strains SYN2339, SYN2340, and SYN2794. SYN2339 is used as a control which can produce tryptophan but cannot convert it to tryptamine and comprises ΔtrpRΔtnaA, tetR-Pₜₑₜ-trpE^{fbr}DCBA (pSC101), tetR-Pₜₑₜ-aroG^{tbr} (p15A). SYN2340 comprises ΔtrpRΔtnaA, tetR-Pₜₑₜ-trpE^{fbr}DCBA (pSC101), tetR-Pₜₑₜ-aroG^{tbr}-tdc_{Cs} (p15A). SYN2794 comprises ΔtrpRΔtnaA, tetR-Pₜₑₜ-trpE^{fbr}DCBA (pSC101), tetR-Pₜₑₜ-aroG^{fbr}-tdc_{Cs} (p15A). Results indicate that Tdc_{Cs} from Clostridium sporogenes is more efficient the Tdc_{Cr} from Catharanthus roseus in tryptamine production and converts all the tryptophan produced into tryptamine.

[0090] FIG. 51A, FIG. 51B, FIG. 51C, FIG. 51D, FIG. 51E depict schematics of non-limiting examples of genetically engineered bacteria of the disclosure which comprises one or more gene sequence(s) and/or gene cassette(s) as described herein.

[0091] FIG. 52 depicts a map of integration sites within the E. coli Nissle chromosome. These sites indicate regions where circuit components may be inserted into the chromosome without interfering with essential gene expression. Backslashes (/) are used to show that the insertion will occur between divergently or convergently expressed genes. Insertions within biosynthetic genes, such as thyA, can be useful for creating nutrient auxotrophies. In some embodiments, an individual circuit component is inserted into more than one of the indicated sites.

[0092] FIG. 53 depicts an exemplary schematic of the E. coli 1917 Nissle chromosome comprising multiple mechanisms of action (MoAs).

[0093] FIG. 54A and FIG. 54B depict schematics of bacterial chromosomes, for example the E. coli Nissle 1917 Chromosome. For example, FIG. 54A depicts a schematic of an engineered bacterium comprising, a circuit for butyrate production, a circuit for propionate production, and a circuit for production of one or more interleukins relevant to IBD. FIG. 54B depicts a schematic of an engineered bacterium comprising three circuits, a circuit for butyrate production, a circuit for GLP-2 expression and and a circuit for production of one or more interleukins relevant to IBD.

[0094] FIG. 55 depicts a schematic of a secretion system based on the flagellar type III secretion in which an incomplete flagellum is used to secrete a therapeutic peptide of interest (star) by recombinantly fusing the peptide to an N-terminal flagellar secretion signal of a native flagellar component so that the intracellularly expressed chimeric peptide can be mobilized across the inner and outer membranes into the surrounding host environment.

[0095] FIG. 56 depicts a schematic of a type V secretion system for the extracellular production of recombinant proteins in which a therapeutic peptide (star) can be fused to an N-terminal secretion signal, a linker and the beta-domain of an autotransporter. In this system, the N-terminal signal sequence directs the protein to the SecA-YEG machinery which moves the protein across the inner membrane into the periplasm, followed by subsequent cleavage of the signal sequence. The beta-domain is recruited to the Bam complex where the beta-domain is folded and inserted into the outer membrane as a beta-barrel structure. The therapeutic peptide is then thread through the hollow pore of the beta-barrel structure ahead of the linker sequence. The therapeutic peptide is freed from the linker system by an autocatalytic cleavage or by targeting of a membrane-associated peptidase (scissors) to a complementary protease cut site in the linker.

[0096] FIG. 57 depicts a schematic of a type 1 secretion system, which translocates a passenger peptide directly from the cytoplasm to the extracellular space using HlyB (an ATP-binding cassette transporter); HlyD (a membrane fusion protein); and TolC (an outer membrane protein) which form a channel through both the inner and outer membranes. The secretion signal-containing C-terminal portion of HlyA is fused to the C-terminal portion of a therapeutic peptide (star) to mediate secretion of this peptide.

[0097] FIG. 58 depicts a schematic of the outer and inner membranes of a gram-negative bacterium, and several deletion targets for generating a leaky or destabilized outer membrane, thereby facilitating the translocation of a therapeutic polypeptides to the extracellular space, e.g., therapeutic polypeptides of eukaryotic origin containing disulphide bonds. Deactivating mutations of one or more genes encoding a protein that tethers the outer membrane to the peptidoglycan skeleton, e.g., lpp, ompC, ompA, ompF, tolA, tolB, pal, and/or one or more genes encoding a periplasmic protease, e.g., degS, degP, nlpl, generates a leaky phenotype. Combinations of mutations may synergistically enhance the leaky phenotype.

[0098] FIG. 59 depicts a modified type 3 secretion system (T3SS) to allow the bacteria to inject secreted therapeutic proteins into the gut lumen. An inducible promoter (small arrow, top), e.g. a FNR-inducible promoter, drives expression of the T3 secretion system gene cassette (3 large arrows, top) that produces the apparatus that secretes tagged peptides out of the cell. An inducible promoter (small arrow, bottom), e.g. a FNR-inducible promoter, drives expression of a regulatory factor, e.g. T7 polymerase, that then activates the expression of the tagged therapeutic peptide (hexagons).

[0099] FIGS. 60A-60C depict other non-limiting embodiments of the disclosure, wherein the expression of a heterologous gene is activated by an exogenous environmental signal. In the absence of arabinose, the AraC transcription factor adopts a conformation that represses transcription. In the presence of arabinose, the AraC transcription factor undergoes a conformational change that allows it to bind to and activate the ParaBAD promoter (P_{araBAD}), which induces expression of the Tet repressor (TetR) and an anti-toxin. The anti-toxin builds up in the recombinant bacterial cell, while TetR prevents expression of a toxin (which is under the control of a promoter having a TetR binding site). However, when arabinose is not present, both the anti-toxin and TetR are not expressed. Since TetR is not present to repress expression of the toxin, the toxin is expressed and kills the cell. FIG. 60A also depicts another non-limiting embodiment of the disclosure, wherein the expression of an essential gene not found in the recombinant bacteria is activated by an exogenous environmental signal. In the absence of arabinose, the AraC transcription factor adopts a conformation that represses transcription of the essential gene under the control of the araBAD promoter and the bacterial cell cannot survive. In the presence of arabinose, the AraC transcription factor undergoes a conformational change that allows it to bind to and activate the araBAD promoter, which induces expression of the essential gene and maintains viability of the bacterial cell. FIG. 60B depicts a non-limiting embodiment of the disclosure, where an anti-toxin is expressed from a constitutive promoter, and expression of a heterologous gene is activated by an exogenous environmental signal. In the absence of arabinose, the AraC transcription factor adopts a conformation that represses transcription. In the presence of arabinose, the AraC transcription factor undergoes a conformational change that allows it to bind to and activate the araBAD promoter, which induces expression of TetR, thus preventing expression of a toxin. However, when arabinose is not present, TetR is not expressed, and the toxin is expressed, eventually overcoming the anti-toxin and killing the cell. The constitutive promoter regulating expression of the anti-toxin should be a weaker promoter than the promoter driving expression of the toxin. The araC gene is under the control of a constitutive promoter in this circuit. FIG. 60C depicts another non-limiting embodiment of the disclosure, wherein the expression of a heterologous gene is activated by an exogenous environmental signal. In the absence of arabinose, the AraC transcription factor adopts a conformation that represses transcription. In the presence of arabinose, the AraC transcription factor undergoes a conformational change that allows it to bind to and activate the araBAD promoter, which induces expression of the Tet repressor (TetR) and an anti-toxin. The anti-toxin builds up in the recombinant bacterial cell, while TetR prevents expression of a toxin (which is under the control of a promoter having a TetR binding site). However, when arabinose is not present, both the anti-toxin and TetR are not expressed. Since TetR is not present to repress expression of the toxin, the toxin is expressed and kills the cell. The araC gene is either under the control of a constitutive promoter or an inducible promoter (e.g., AraC promoter) in this circuit.

[0100] FIG. 61 depicts one non-limiting embodiment of the disclosure, where an exogenous environmental condition or one or more environmental signals activates expression of a heterologous gene and at least one recombinase from an inducible promoter or inducible promoters. The recombinase then flips a toxin gene into an activated conformation, and the natural kinetics of the recombinase create a time delay in expression of the toxin, allowing the heterologous gene to be fully expressed. Once the toxin is expressed, it kills the cell.

[0101] FIG. 62 depicts another non-limiting embodiment of the disclosure, where an exogenous environmental condition or one or more environmental signals activates expression of a heterologous gene, an anti-toxin, and at least one recombinase from an inducible promoter or inducible promoters. The recombinase then flips a toxin gene into an activated conformation, but the presence of the accumulated anti-toxin suppresses the activity of the toxin. Once the exogenous environmental condition or cue(s) is no longer present, expression of the anti-toxin is turned off. The toxin is constitutively expressed, continues to accumulate, and kills the bacterial cell.

[0102] FIG. 63 depicts another non-limiting embodiment of the disclosure, where an exogenous environmental condition or one or more environmental signals activates expression of a heterologous gene and at least one recombinase from an inducible promoter or inducible promoters. The recombinase then flips at least one excision enzyme into an activated conformation. The at least one excision enzyme then excises one or more essential genes, leading to senescence, and eventual cell death. The natural kinetics of the recombinase and excision genes cause a time delay, the kinetics of which can be altered and optimized depending on the number and choice of essential genes to be excised, allowing cell death to occur within a matter of hours or days. The presence of multiple nested recombinases can be used to further control the timing of cell death.

[0103] FIG. 64 depicts one non-limiting embodiment of the disclosure, where an exogenous environmental condition or one or more environmental signals activates expression of a heterologous gene and a first recombinase from an inducible promoter or inducible promoters. The recombinase then flips a second recombinase from an inverted orientation to an active conformation. The activated second recombinase flips the toxin gene into an activated conformation, and the natural kinetics of the recombinase create a time delay in expression of the toxin, allowing the heterologous gene to be fully expressed. Once the toxin is expressed, it kills the cell.

[0104] FIG. 65 depicts the use of GeneGuards as an engineered safety component. All engineered DNA is present on a plasmid which can be conditionally destroyed. See, e.g., Wright et al., “GeneGuard: A Modular Plasmid System Designed for Biosafety,” ACS Synthetic Biology (2015) 4: 307-316.

[0105] FIG. 66 depicts β-galactosidase levels in samples comprising bacteria harboring a low-copy plasmid expressing lacZ from an FNR-responsive promoter selected from the exemplary FNR promoters shown in the tables (Pfnr1-5). Different FNR-responsive promoters were used to create a library of anaerobic-inducible reporters with a variety of expression levels and dynamic ranges. These promoters included strong ribosome binding sites. Bacterial cultures were grown in either aerobic (+O₂) or anaerobic conditions (−O₂). Samples were removed at 4 hrs and the promoter activity based on β-galactosidase levels was analyzed by performing standard β-galactosidase colorimetric assays.

[0106] FIGS. 67A-67C depict a schematic representation of the lacZ gene under the control of an exemplary FNR promoter (P_{fnrS}) and corresponding graphical data. FIG. 67A depicts a schematic representation of the lacZ gene under the control of an exemplary FNR promoter (P_{fnrS}). LacZ encodes the β-galactosidase enzyme and is a common reporter gene in bacteria. FIG. 67B depicts FNR promoter activity as a function of β-galactosidase activity in SYN340. SYN340, an engineered bacterial strain harboring a low-copy fnrS-lacZ fusion gene, was grown in the presence or absence of oxygen. Values for standard β-galactosidase colorimetric assays are expressed in Miller units (Miller, 1972). These data suggest that the fnrS promoter begins to drive high-level gene expression within 1 hr under anaerobic conditions. FIG. 67C depicts the growth of bacterial cell cultures expressing lacZ over time, both in the presence and absence of oxygen.

[0107] FIGS. 68A-68D depict bar graphs, schematic, and dot blot, respectively, showing the structure or activity of reporter constructs. FIG. 68A and FIG. 68B depict bar graphs of reporter constructs activity. FIG. 68A depicts a graph of an ATC-inducible reporter construct expression and FIG. 68B depicts a graph of a nitric oxide-inducible reporter construct expression. These constructs, when induced by their cognate inducer, lead to expression of GFP. Nissle cells harboring plasmids with either the control, ATC-inducible Pₜₑₜ-GFP reporter construct or the nitric oxide inducible P_{nsrR}-GFP reporter construct induced across a range of concentrations. Promoter activity is expressed as relative florescence units. FIG. 68C depicts a schematic of the constructs. FIG. 68D depicts a dot blot of bacteria harboring a plasmid expressing NsrR under control of a constitutive promoter and the reporter gene gfp (green fluorescent protein) under control of an NsrR-inducible promoter. DSS-treated mice serve as exemplary models for HE. As in HE subjects, the guts of mice are damaged by supplementing drinking water with 2-3% dextran sodium sulfate (DSS). Chemiluminescent is shown for NsrR-regulated promoters induced in DSS-treated mice.

[0108] FIG. 69 depicts a graph of Nissle residence in vivo. Streptomycin-resistant Nissle was administered to mice via oral gavage without antibiotic pre-treatment. Fecal pellets from 6 total mice were monitored post-administration to determine the amount of administered Nissle still residing within the mouse gastrointestinal tract. The bars represent the number of bacteria administered to the mice. The line represents the number of Nissle recovered from the fecal samples each day for 10 consecutive days.

[0109] FIG. 70 depicts a bar graph of residence over time for streptomycin resistant Nissle in various compartments of the intestinal tract at 1, 4, 8, 12, 24, and 30 hours post gavage. Mice were treated with approximately 109 CFU, and at each timepoint, animals (n=4) were euthanized, and intestine, cecum, and colon were removed. The small intestine was cut into three sections, and the large intestine and colon each into two sections. Intestinal effluents gathered and CFUs in each compartment were determined by serial dilution plating.

[0110] FIG. 71A and FIG. 71B depict a schematic diagrams of a wild-type clbA construct (FIG. 71A) and a schematic diagram of a clbA knockout construct (FIG. 71B).

[0111] FIG. 72 depicts a schematic of a design-build-test cycle. Steps are as follows: 1: Define the disease pathway; 2. Identify target metabolites; 3. Design genetic circuits; 4. Build synthetic biotic; 5. Activate circuit in vivo; 6. Characterize circuit activation kinetics; 7. Optimize in vitro productivity to disease threshold; 8. Test optimize circuit in animal disease model; 9. Assimilate into the microbiome; 10. Develop understanding of in vivo PK and dosing regimen.

[0112] FIG. 73 depicts a schematic of non-limiting manufacturing processes for upstream and downstream production of the genetically engineered bacteria of the present disclosure. Step 1 depicts the parameters for starter culture 1 (SC1): loop full—glycerol stock, duration overnight, temperature 37° C., shaking at 250 rpm. Step 2 depicts the parameters for starter culture 2 (SC2): 1/100 dilution from SC1, duration 1.5 hours, temperature 37° C., shaking at 250 rpm. Step 3 depicts the parameters for the production bioreactor: inoculum—SC2, temperature 37° C., pH set point 7.00, pH dead band 0.05, dissolved oxygen set point 50%, dissolved oxygen cascade agitation/gas FLO, agitation limits 300-1200 rpm, gas FLO limits 0.5-20 standard liters per minute, duration 24 hours. Step 4 depicts the parameters for harvest: centrifugation at speed 4000 rpm and duration 30 minutes, wash IX 10% glycerol/PBS, centrifugation, re-suspension 10% glycerol/PBS. Step 5 depicts the parameters for vial fill/storage: 1-2 mL aliquots, −80° C.

[0113] FIG. 74 depicts three bacterial strains which constitutively express red fluorescent protein (RFP). In strains 1-3, the rfp gene has been inserted into different sites within the bacterial chromosome, and results in varying degrees of brightness under fluorescent light. Unmodified E. coli Nissle (strain 4) is non-fluorescent.

[0114] FIG. 75A depicts a graph showing bacterial cell growth of a Nissle thyA auxotroph strain (thyA knock-out) in various concentrations of thymidine. A chloramphenicol-resistant Nissle thyA auxotroph strain was grown overnight in LB+10 mM thymidine at 37 C. The next day, cells were diluted 1:100 in 1 mL LB+10 mM thymidine, and incubated at 37 C for 4 hours. The cells were then diluted 1:100 in 1 mL LB+varying concentrations of thymidine in triplicate in a 96-well plate. The plate is incubated at 37 C with shaking, and the OD600 is measured every 5 minutes for 720 minutes. This data shows that Nissle thyA auxotroph does not grow in environments lacking thymidine.

[0115] FIG. 75B depicts a bar graph of Nissle residence in vivo of wildtype Nissle versus Nissle thyA auxotroph (thyA knock-out). Streptomycin-resistant Nissle (wildtype or thyA auxotroph) was administered to mice via oral gavage without antibiotic pre-treatment. Fecal pellets from 6 total mice were monitored post-administration to determine the amount of administered Nissle still residing within the mouse gastrointestinal tract. Each bar represents the number of Nissle recovered from the fecal samples each day for 7 consecutive days. There were no bacteria recovered in fecal samples from mice gavaged with Nissle thyA auxotroph bacteria after day 3. This data shows that the Nissle thyA auxotroph does not persist in vivo in mice.

[0116] FIG. 76 depicts a one non-limiting embodiment of the disclosure, which comprises a plasmid stability system with a plasmid that produces both a short-lived anti-toxin and a long-lived toxin. When the cell loses the plasmid, the anti-toxin is no longer produced, and the toxin kills the cell. In one embodiment, the genetically engineered bacteria produce an equal amount of a Hok toxin and a short-lived Sok antitoxin. In the upper panel, the cell produces equal amounts of toxin and anti-toxin and is stable. In the center panel, the cell loses the plasmid and anti-toxin begins to decay. In the lower panel, the anti-toxin decays completely, and the cell dies.

[0117] FIGS. 77A-77D depict schematics of non-limiting examples of the gene organization of plasmids, which function as a component of a biosafety system (FIG. 77A and FIG. 77B), which also contains a chromosomal component (shown in FIG. 77C and FIG. 77D). The biosafety plasmid system vector comprises Kid Toxin and R6K minimal ori, dapA (FIG. 77A) and thyA (FIG. 77B) and promoter elements driving expression of these components. In some embodiments, bla is knocked out and replaced with one or more constructs described herein, in which a first protein of interest (POI1) and/or a second protein of interest, e.g., a transporter (POI2), and/or a third protein of interest (POI3) are expressed from an inducible or constitutive promoter. FIG. 77C and FIG. 77D depict schematics of the gene organization of the chromosomal component of a biosafety system. FIG. 77C depicts a construct comprising low copy Rep (Pi) and Kis antitoxin, in which transcription of Pi (Rep), which is required for the replication of the plasmid component of the system, is driven by a low copy RBS containing promoter. FIG. 77D depicts a construct comprising a medium-copy Rep (Pi) and Kis antitoxin, in which transcription of Pi (Rep), which is required for the replication of the plasmid component of the system, is driven by a medium copy RBS containing promoter. If the plasmid containing the functional DapA is used (as shown in FIG. 77A), then the chromosomal constructs shown in FIG. 77C and FIG. 77D are knocked into the DapA locus. If the plasmid containing the functional ThyA is used (as shown in FIG. 77B), then the chromosomal constructs shown in FIG. 77C and FIG. 77D are knocked into the ThyA locus. In this system, the bacteria comprising the chromosomal construct and a knocked out dapA or thyA gene can grow in the absence of dap or thymidine only in the presence of the plasmid.

[0118] FIG. 78 depicts a schematic of a polypeptide of interest displayed on the surface of the bacterium. A non-limiting example of such a therapeutic protein is a scFv. The polypeptide is expressed as a fusion protein, which comprises a outer membrane anchor from another protein, which was developed as part of a display system. Non-limiting examples of such anchors are described herein and include LppOmpA, NGIgAsig-NGIgAP, InaQ, Intimin, Invasin, pelB-PAL, and blcA/BAN. In a nonlimiting example a bacterial strain which has one or more diffusible outer membrane phenotype (“leaky membrane”) mutation, e.g., as described herein.

[0119] FIG. 79 depicts the gene organization of exemplary construct comprising FNRS24Y driven by the arabinose inducible promoter and araC in reverse direction.

[0120] FIG. 80A depicts a “Oxygen bypass switch” useful for aerobic pre-induction of a strain comprising one or proteins of interest (POI), e.g., one or more anti-cancer molecules or immune modulatory effectors (POI1) and a second set of one or more proteins of interest (POI2), e.g., one or more transporter(s)/importer(s) and/or exporter(s), under the control of a low oxygen FNR promoter in vitro in a culture vessel (e.g., flask, fermenter or other vessel, e.g., used during with cell growth, cell expansion, fermentation, recovery, purification, formulation, and/or manufacture). In some embodiments, it is desirable to pre-load a strain with active effector molecules prior to administration. This can be done by pre-inducing the expression of these effectors as the strains are propagated, (e.g., in flasks, fermenters or other appropriate vesicles) and are prepared for in vivo administration. In some embodiments, strains are induced under anaerobic and/or low oxygen conditions, e.g. to induce FNR promoter activity and drive expression of one or more effectors or proteins of interest. In some embodiments, it is desirable to prepare, pre-load and pre-induce the strains under aerobic or microaerobic conditions with one or more effectors or proteins of interest. This allows more efficient growth and, in some cases, reduces the build-up of toxic metabolites.

[0121] FNRS24Y is a mutated form of FNR which is more resistant to inactivation by oxygen, and therefore can activate FNR promoters under aerobic conditions (see e.g., Jervis A J, The O2 sensitivity of the transcription factor FNR is controlled by Ser24 modulating the kinetics of [4Fe-4S] to [2Fe-2S] conversion, Proc Natl Acad Sci USA. 2009 Mar. 24; 106(12):4659-64, the contents of which is herein incorporated by reference in its entirety). In this oxygen bypass system, FNRS24Y is induced by addition of arabinose and then drives the expression of one or more POIs by binding and activating the FNR promoter under aerobic conditions. Thus, strains can be grown, produced or manufactured efficiently under aerobic conditions, while being effectively pre-induced and pre-loaded, as the system takes advantage of the strong FNR promoter resulting in of high levels of expression of one or more POIs. This system does not interfere with or compromise in vivo activation, since the mutated FNRS24Y is no longer expressed in the absence of arabinose, and wild type FNR then binds to the FNR promoter and drives expression of the POIs in vivo. In some embodiments, a LacI promoter and IPTG induction are used in this system (in lieu of Para and arabinose induction). In some embodiments, a rhamnose inducible promoter is used in this system. In some embodiments, a temperature sensitive promoter is used to drive expression of FNRS24Y.

[0122] FIG. 80B depicts a strategy to allow the expression of one or more POI(s) under aerobic conditions through the arabinose inducible expression of FNRS24Y. By using a ribosome binding site optimization strategy, the levels of Fnr^{S24Y} expression can be fine-tuned, e.g., under optimal inducing conditions (adequate amounts of arabinose for full induction). Fine-tuning is accomplished by selection of an appropriate RBS with the appropriate translation initiation rate. Bioinformatics tools for optimization of RBS are known in the art.

[0123] FIG. 80C depicts a strategy to fine-tune the expression of a Para-POI construct by using a ribosome binding site optimization strategy. Bioinformatics tools for optimization of RBS are known in the art. In one strategy, arabinose controlled POI genes can be integrated into the chromosome to provide for efficient aerobic growth and pre-induction of the strain (e.g., in flasks, fermenters or other appropriate vesicles), while integrated versions of P_{fnrS}-POI constructs are maintained to allow for strong in vivo induction.

[0124] FIG. 81 depicts the gene organization of an exemplary construct, e.g., comprised in SYN-PKU401, comprising a cloned POI gene under the control of a Tet promoter sequence and a Tet repressor gene.

[0125] FIG. 82 depicts the gene organization of an exemplary construct comprising LacI in reverse orientation, and a IPTG inducible promoter driving the expression of one or more POIs. In some embodiments, this construct is useful for pre-induction and pre-loading of a therapeutic strain prior to in vivo administration under aerobic conditions and in the presence of inducer, e.g., IPTG. In some embodiments, this construct is used alone. In some embodiments, the construct is used in combination with other constitutive or inducible POI constructs, e.g., low oxygen, arabinose or IPTG inducible constructs. In some embodiments, the construct is used in combination with a low-oxygen inducible construct which is active in an in vivo setting.

[0126] In some embodiments, the construct is located on a plasmid, e.g., a low copy or a high copy plasmid. In some embodiments, the construct is located on a plasmid component of a biosafety system. In some embodiments, the construct is integrated into the bacterial chromosome at one or more locations. In some embodiments, the construct is used in combination with construct expressing a second POI, e.g., a transporter, which can either be provided on a plasmid or is integrated into the bacterial chromosome at one or more locations. POI2 expression may be constitutive or driven by an inducible promoter, e.g., low-oxygen, arabinose, or IPTG. In some embodiments, the construct is located on a plasmid, e.g., a low or high copy plasmid. In some embodiments, the construct is employed in a biosafety system, such as the system shown in FIG. 77A, FIG. 77B, FIG. 77C, and FIG. 77D. In some embodiments, the construct is integrated into the genome at one or more locations described herein.

[0127] FIG. 83A, FIG. 83B, and FIG. 83C depict schematics of non-limiting examples of constructs for the expression of proteins of interest POI(s). FIG. 83A depicts a schematic of a non-limiting example of the organization of a construct for POI expression under the control a lambda CI inducible promoter. The construct also provides the coding sequence of a mutant of CI, CI857, which is a temperature sensitive mutant of CI. The temperature sensitive CI repressor mutant, CI857, binds tightly at 30 degrees C. but is unable to bind (repress) at temperatures of 37 C and above. In some embodiments, this construct is used alone. In some embodiments, the temperature sensitive construct is used in combination with other constitutive or inducible POI constructs, e.g., low oxygen, arabinose, rhamnose, or IPTG inducible constructs. In some embodiments, the construct allows pre-induction and pre-loading of a POI10 and/or a POI2 prior to in vivo administration. In some embodiments, the construct provides in vivo activity. In some embodiments, the construct is located on a plasmid, e.g., a low copy or a high copy plasmid. In some embodiments, the construct is located on a plasmid component of a biosafety system. In some embodiments, the construct is integrated into the bacterial chromosome at one or more locations. In some embodiments, the construct is used in combination with a POI2 construct, which can either be provided on a plasmid or is integrated into the bacterial chromosome at one or more locations. POI2 expression may be constitutive or driven by an inducible promoter, e.g., low-oxygen, arabinose, rhamnose, or temperature sensitive. In some embodiments, the construct is used in combination with a POI3 expression construct.

[0128] In some embodiments, a temperature sensitive system can be used to set up a conditional auxotrophy. In a a strain comprising deltaThyA or deltaDapA, a dapA or thyA gene can be introduced into the strain under the control of a thermoregulated promoter system. The strain can grow in the absence of Thy and Dap only at the permissive temperature, e.g., 37 C (and not lower).

[0129] FIG. 84A depicts a schematic of the gene organization of a PssB promoter. The ssB gene product protects ssDNA from degradation; SSB interacts directly with numerous enzymes of DNA metabolism and is believed to have a central role in organizing the nucleoprotein complexes and processes involved in DNA replication (and replication restart), recombination and repair. The PssB promoter was cloned in front of a LacZ reporter and beta-galactosidase activity was measured.

[0130] FIG. 84B depicts a bar graph showing the reporter gene activity for the PssB promoter under aerobic and anaerobic conditions. Briefly, cells were grown aerobically overnight, then diluted 1:100 and split into two different tubes. One tube was placed in the anaerobic chamber, and the other was kept in aerobic conditions for the length of the experiment. At specific times, the cells were analyzed for promoter induction. The Pssb promoter is active under aerobic conditions, and shuts off under anaerobic conditions. This promoter can be used to express a gene of interest under aerobic conditions. This promoter can also be used to tightly control the expression of a gene product such that it is only expressed under anaerobic and/or low oxygen conditions. In this case, the oxygen induced PssB promoter induces the expression of a repressor, which represses the expression of a gene of interest. Thus, the gene of interest is only expressed in the absence of the repressor, i.e., under anaerobic and/or low oxygen conditions. This strategy has the advantage of an additional level of control for improved fine-tuning and tighter control. In one non-limiting example, this strategy can be used to control expression of thyA and/or dapA, e.g., to make a conditional auxotroph. The chromosomal copy of dapA or ThyA is knocked out. Under anaerobic and/or low oxygen conditions, dapA or thyA—as the case may be—are expressed, and the strain can grow in the absence of dap or thymidine. Under aerobic conditions, dapA or thyA expression is shut off, and the strain cannot grow in the absence of dap or thymidine. Such a strategy can, for example be employed to allow survival of bacteria under anaerobic and/or low oxygen conditions, e.g., the gut, but prevent survival under aerobic conditions (biosafety switch).

[0131] FIG. 85A depicts a schematic diagram of a wild-type clbA construct.

[0132] FIG. 85B depicts a schematic diagram of a clbA knockout construct.

### DESCRIPTION OF EMBODIMENTS

[0133] The present disclosure includes genetically engineered bacteria, pharmaceutical compositions thereof, and methods of reducing gut inflammation, enhancing gut barrier function, and/or treating or preventing autoimmune disorders. In some embodiments, the genetically engineered bacteria comprise at least one non-native gene and/or gene cassette for producing a non-native anti-inflammation and/or gut barrier function enhancer molecule(s). In some embodiments, the at least one gene and/or gene cassette is further operably linked to a regulatory region that is controlled by a transcription factor that is capable of sensing an inducing condition, e.g., a low-oxygen environment, the presence of ROS, or the presence of RNS. The genetically engineered bacteria are capable of producing the anti-inflammation and/or gut barrier function enhancer molecule(s) in inducing environments, e.g., in the gut. Thus, the genetically engineered bacteria and pharmaceutical compositions comprising those bacteria may be used to treat or prevent autoimmune disorders and/or diseases or conditions associated with gut inflammation and/or compromised gut barrier function, including IBD.

[0134] In order that the disclosure may be more readily understood, certain terms are first defined. These definitions should be read in light of the remainder of the disclosure and as understood by a person of ordinary skill in the art. Unless defined otherwise, all technical and scientific terms used herein have the same meaning as commonly understood by a person of ordinary skill in the art. Additional definitions are set forth throughout the detailed description.

[0135] As used herein, “diseases and conditions associated with gut inflammation and/or compromised gut barrier function” include, but are not limited to, inflammatory bowel diseases, diarrheal diseases, and related diseases. “Inflammatory bowel diseases” and “IBD” are used interchangeably herein to refer to a group of diseases associated with gut inflammation, which include, but are not limited to, Crohn's disease, ulcerative colitis, collagenous colitis, lymphocytic colitis, diversion colitis, Behcet's disease, and indeterminate colitis. As used herein, “diarrheal diseases” include, but are not limited to, acute watery diarrhea, e.g., cholera; acute bloody diarrhea, e.g., dysentery; and persistent diarrhea. As used herein, related diseases include, but are not limited to, short bowel syndrome, ulcerative proctitis, proctosigmoiditis, left-sided colitis, pancolitis, and fulminant colitis.

[0136] Symptoms associated with the aforementioned diseases and conditions include, but are not limited to, one or more of diarrhea, bloody stool, mouth sores, perianal disease, abdominal pain, abdominal cramping, fever, fatigue, weight loss, iron deficiency, anemia, appetite loss, weight loss, anorexia, delayed growth, delayed pubertal development, inflammation of the skin, inflammation of the eyes, inflammation of the joints, inflammation of the liver, and inflammation of the bile ducts.

[0137] A disease or condition associated with gut inflammation and/or compromised gut barrier function may be an autoimmune disorder. A disease or condition associated with gut inflammation and/or compromised gut barrier function may be co-morbid with an autoimmune disorder. As used herein, “autoimmune disorders” include, but are not limited to, acute disseminated encephalomyelitis (ADEM), acute necrotizing hemorrhagic leukoencephalitis, Addison's disease, agammaglobulinemia, alopecia areata, amyloidosis, ankylosing spondylitis, anti-GBM/anti-TBM nephritis, antiphospholipid syndrome (APS), autoimmune angioedema, autoimmune aplastic anemia, autoimmune dysautonomia, autoimmune hemolytic anemia, autoimmune hepatitis, autoimmune hyperlipidemia, autoimmune immunodeficiency, autoimmune inner ear disease (AIED), autoimmune myocarditis, autoimmune oophoritis, autoimmune pancreatitis, autoimmune retinopathy, autoimmune thrombocytopenic purpura (ATP), autoimmune thyroid disease, autoimmune urticarial, axonal & neuronal neuropathies, Balo disease, Behcet's disease, bullous pemphigoid, cardiomyopathy, Castleman disease, celiac disease, Chagas disease, chronic inflammatory demyelinating polyneuropathy (CIDP), chronic recurrent multifocal ostomyelitis (CRMO), Churg-Strauss syndrome, cicatricial pemphigoid/benign mucosal pemphigoid, Crohn's disease, Cogan's syndrome, cold agglutinin disease, congenital heart block, Coxsackie myocarditis, CREST disease, essential mixed cryoglobulinemia, demyelinating neuropathies, dermatitis herpetiformis, dermatomyositis, Devic's disease (neuromyelitis optica), discoid lupus, Dressler's syndrome, endometriosis, eosinophilic esophagitis, eosinophilic fasciitis, erythema nodosum, experimental allergic encephalomyelitis, Evans syndrome, fibrosing alveolitis, giant cell arteritis (temporal arteritis), giant cell myocarditis, glomerulonephritis, Goodpasture's syndrome, granulomatosis with polyangiitis (GPA), Graves' disease, Guillain-Barre syndrome, Hashimoto's encephalitis, Hashimoto's thyroiditis, hemolytic anemia, Henoch-Schonlein purpura, herpes gestationis, hypogammaglobulinemia, idiopathic thrombocytopenic purpura (ITP), IgA nephropathy, IgG4-related sclerosing disease, immunoregulatory lipoproteins, inclusion body myositis, interstitial cystitis, juvenile arthritis, juvenile idiopathic arthritis, juvenile myositis, Kawasaki syndrome, Lambert-Eaton syndrome, leukocytoclastic vasculitis, lichen planus, lichen sclerosus, ligneous conjunctivitis, linear IgA disease (LAD), lupus (systemic lupus erythematosus), chronic Lyme disease, Meniere's disease, microscopic polyangiitis, mixed connective tissue disease (MCTD), Mooren's ulcer, Mucha-Habermann disease, multiple sclerosis, myasthenia gravis, myositis, narcolepsy, neuromyelitis optica (Devic's), neutropenia, ocular cicatricial pemphigoid, optic neuritis, palindromic rheumatism, PANDAS (Pediatric Autoimmune Neuropsychiatric Disorders Associated with Streptococcus), paraneoplastic cerebellar degeneration, paroxysmal nocturnal hemoglobinuria (PNH), Parry Romberg syndrome, Parsonnage-Turner syndrome, pars planitis (peripheral uveitis), pemphigus, peripheral neuropathy, perivenous encephalomyelitis, pernicious anemia, POEMS syndrome, polyarteritis nodosa, type I, II, & III autoimmune polyglandular syndromes, polymyalgia rheumatic, polymyositis, postmyocardial infarction syndrome, postpericardiotomy syndrome, progesterone dermatitis, primary biliary cirrhosis, primary sclerosing cholangitis, psoriasis, psoriatic arthritis, idiopathic pulmonary fibrosis, pyoderma gangrenosum, pure red cell aplasia, Raynaud's phenomenon, reactive arthritis, reflex sympathetic dystrophy, Reiter's syndrome, relapsing polychondritis, restless legs syndrome, retroperitoneal fibrosis, rheumatic fever, rheumatoid arthritis, sarcoidosis, Schmidt syndrome, scleritis, scleroderma, Sjogren's syndrome, sperm & testicular autoimmunity, stiff person syndrome, subacute bacterial endocarditis (SBE), Susac's syndrome, sympathetic ophthalmia, Takayasu's arteritis, temporal arteritis/giant cell arteritis, thrombocytopenic purpura (TTP), Tolosa-Hunt syndrome, transverse myelitis, type 1 diabetes, asthma, ulcerative colitis, undifferentiated connective tissue disease (UCTD), uveitis, vasculitis, vesiculobullous dermatosis, vitiligo, and Wegener's granulomatosis.

[0138] As used herein, “anti-inflammation molecules” and/or “gut barrier function enhancer molecules” include, but are not limited to, short-chain fatty acids, butyrate, propionate, acetate, IL-2, IL-22, superoxide dismutase (SOD), GLP-2 and analogs, GLP-1, IL-10, IL-27, TGF-β1, TGF-β2, N-acylphosphatidylethanolamines (NAPEs), elafin (also called peptidase inhibitor 3 and SKALP), trefoil factor, melatonin, tryptophan, PGD₂, and kynurenic acid, indole metabolites, and other tryptophan metabolites, as well as other molecules disclosed herein. Such molecules may also include compounds that inhibit pro-inflammatory molecules, e.g., a single-chain variable fragment (scFv), antisense RNA, siRNA, or shRNA that neutralizes TNF-α, IFN-γ, IL-1β, IL-6, IL-8, IL-17, and/or chemokines, e.g., CXCL-8 and CCL2. Such molecules also include AHR agonists (e.g., which result in IL-22 production, e.g., indole acetic acid, indole-3-aldehyde, and indole) and and PXR agonists (e.g., IPA), as described herein. Such molecules also include HDAC inhibitors (e.g., butyrate), activators of GPR41 and/or GPR43 (e.g., butyrate and/or propionate and/or acetate), activators of GPR109A (e.g., butyrate), inhibitors of NF-kappaB signaling (e.g., butyrate), and modulators of PPARgamma (e.g., butyrate), activators of AMPK signaling (e.g., acetate), and modulators of GLP-1 secretion. Such molecules also include hydroxyl radical scavengers and antioxidants (e.g., IPA). A molecule may be primarily anti-inflammatory, e.g., IL-10, or primarily gut barrier function enhancing, e.g., GLP-2. A molecule may be both anti-inflammatory and gut barrier function enhancing. An anti-inflammation and/or gut barrier function enhancer molecule may be encoded by a single gene, e.g., elafin is encoded by the PI3 gene. Alternatively, an anti-inflammation and/or gut barrier function enhancer molecule may be synthesized by a biosynthetic pathway requiring multiple genes, e.g., butyrate. These molecules may also be referred to as therapeutic molecules. In some instances, the “anti-inflammation molecules” and/or “gut barrier function enhancer molecules” are referred to herein as “effector molecules” or “therapeutic molecules” or “therapeutic polypeptides”.

[0139] As used herein, the term “recombinant microorganism” refers to a microorganism, e.g., bacterial, yeast, or viral cell, or bacteria, yeast, or virus, that has been genetically modified from its native state. Thus, a “recombinant bacterial cell” or “recombinant bacteria” refers to a bacterial cell or bacteria that have been genetically modified from their native state. For instance, a recombinant bacterial cell may have nucleotide insertions, nucleotide deletions, nucleotide rearrangements, and nucleotide modifications introduced into their DNA. These genetic modifications may be present in the chromosome of the bacteria or bacterial cell, or on a plasmid in the bacteria or bacterial cell. Recombinant bacterial cells disclosed herein may comprise exogenous nucleotide sequences on plasmids. Alternatively, recombinant bacterial cells may comprise exogenous nucleotide sequences stably incorporated into their chromosome.

[0140] A “programmed or engineered microorganism” refers to a microorganism, e.g., bacterial or viral cell, or bacteria or virus, that has been genetically modified from its native state to perform a specific function. Thus, a “programmed or engineered bacterial cell” or “programmed or engineered bacteria” refers to a bacterial cell or bacteria that has been genetically modified from its native state to perform a specific function. In certain embodiments, the programmed or engineered bacterial cell has been modified to express one or more proteins, for example, one or more proteins that have a therapeutic activity or serve a therapeutic purpose. The programmed or engineered bacterial cell may additionally have the ability to stop growing or to destroy itself once the protein(s) of interest have been expressed.

[0141] As used herein, the term “gene” refers to a nucleic acid fragment that encodes a protein or fragment thereof, optionally including regulatory sequences preceding (5′ non-coding sequences) and following (3′ non-coding sequences) the coding sequence. In one embodiment, a “gene” does not include regulatory sequences preceding and following the coding sequence. A “native gene” refers to a gene as found in nature, optionally with its own regulatory sequences preceding and following the coding sequence. A “chimeric gene” refers to any gene that is not a native gene, optionally comprising regulatory sequences preceding and following the coding sequence, wherein the coding sequences and/or the regulatory sequences, in whole or in part, are not found together in nature. Thus, a chimeric gene may comprise regulatory sequences and coding sequences that are derived from different sources, or regulatory and coding sequences that are derived from the same source, but arranged differently than is found in nature.

[0142] As used herein, the term “gene sequence” is meant to refer to a genetic sequence, e.g., a nucleic acid sequence. The gene sequence or genetic sequence is meant to include a complete gene sequence or a partial gene sequence. The gene sequence or genetic sequence is meant to include sequence that encodes a protein or polypeptide and is also meant to include genetic sequence that does not encode a protein or polypeptide, e.g., a regulatory sequence, leader sequence, signal sequence, or other non-protein coding sequence.

[0143] In some embodiments, the term “gene” or “gene sequence” is meant to refer to a nucleic acid sequence encoding any of the anti-inflammatory and gut barrier function enhancing molecules described herein, e.g., IL-2, IL-22, superoxide dismutase (SOD), kynurenine, GLP-2, GLP-1, IL-10, IL-27, TGF-β1, TGF-β2, N-acylphosphatidylethanolamines (NAPEs), elafin, and trefoil factor, as well as others. The nucleic acid sequence may comprise the entire gene sequence or a partial gene sequence encoding a functional molecule. The nucleic acid sequence may be a natural sequence or a synthetic sequence. The nucleic acid sequence may comprise a native or wild-type sequence or may comprise a modified sequence having one or more insertions, deletions, substitutions, or other modifications, for example, the nucleic acid sequence may be codon-optimized.

[0144] As used herein, a “heterologous” gene or “heterologous sequence” refers to a nucleotide sequence that is not normally found in a given cell in nature. As used herein, a heterologous sequence encompasses a nucleic acid sequence that is exogenously introduced into a given cell and can be a native sequence (naturally found or expressed in the cell) or non-native sequence (not naturally found or expressed in the cell) and can be a natural or wild-type sequence or a variant, non-natural, or synthetic sequence. “Heterologous gene” includes a native gene, or fragment thereof, that has been introduced into the host cell in a form that is different from the corresponding native gene. For example, a heterologous gene may include a native coding sequence that is a portion of a chimeric gene to include non-native regulatory regions that is reintroduced into the host cell. A heterologous gene may also include a native gene, or fragment thereof, introduced into a non-native host cell. Thus, a heterologous gene may be foreign or native to the recipient cell; a nucleic acid sequence that is naturally found in a given cell but expresses an unnatural amount of the nucleic acid and/or the polypeptide which it encodes; and/or two or more nucleic acid sequences that are not found in the same relationship to each other in nature. As used herein, the term “endogenous gene” refers to a native gene in its natural location in the genome of an organism. As used herein, the term “transgene” refers to a gene that has been introduced into the host organism, e.g., host bacterial cell, genome.

[0145] As used herein, a “non-native” nucleic acid sequence refers to a nucleic acid sequence not normally present in a microorganism, e.g., an extra copy of an endogenous sequence, or a heterologous sequence such as a sequence from a different species, strain, or substrain of bacteria or virus, or a sequence that is modified and/or mutated as compared to the unmodified sequence from bacteria or virus of the same subtype. In some embodiments, the non-native nucleic acid sequence is a synthetic, non-naturally occurring sequence (see, e.g., Purcell et al., 2013). The non-native nucleic acid sequence may be a regulatory region, a promoter, a gene, and/or one or more genes in gene cassette. In some embodiments, “non-native” refers to two or more nucleic acid sequences that are not found in the same relationship to each other in nature. The non-native nucleic acid sequence may be present on a plasmid or chromosome. In some embodiments, the genetically engineered microorganism of the disclosure comprises a gene that is operably linked to a promoter that is not associated with said gene in nature. For example, in some embodiments, the genetically engineered bacteria disclosed herein comprise a gene that is operably linked to a directly or indirectly inducible promoter that is not associated with said gene in nature, e.g., an FNR responsive promoter (or other promoter disclosed herein) operably linked to an anti-inflammatory or gut barrier enhancer molecule. In some embodiments, the genetically engineered virus of the disclosure comprises a gene that is operably linked to a directly or indirectly inducible promoter that is not associated with said gene in nature, e.g., a promoter operably linked to a gene encoding an anti-inflammatory or gut barrier enhancer molecule.

[0146] As used herein, the term “coding region” refers to a nucleotide sequence that codes for a specific amino acid sequence. The term “regulatory sequence” refers to a nucleotide sequence located upstream (5′ non-coding sequences), within, or downstream (3′ non-coding sequences) of a coding sequence, and which influences the transcription, RNA processing, RNA stability, or translation of the associated coding sequence. Examples of regulatory sequences include, but are not limited to, promoters, translation leader sequences, effector binding sites, signal sequences, and stem-loop structures. In one embodiment, the regulatory sequence comprises a promoter, e.g., an FNR responsive promoter or other promoter disclosed herein.

[0147] As used herein, a “gene cassette” or “operon” encoding a biosynthetic pathway refers to the two or more genes that are required to produce an anti-inflammatory or gut barrier enhancer molecule. In addition to encoding a set of genes capable of producing said molecule, the gene cassette or operon may also comprise additional transcription and translation elements, e.g., a ribosome binding site.

[0148] A “butyrogenic gene cassette,” “butyrate biosynthesis gene cassette,” and “butyrate operon” are used interchangeably to refer to a set of genes capable of producing butyrate in a biosynthetic pathway. Unmodified bacteria that are capable of producing butyrate via an endogenous butyrate biosynthesis pathway include, but are not limited to, Clostridium, Peptoclostridium, Fusobacterium, Butyrivibrio, Eubacterium, and Treponema. The genetically engineered bacteria of the invention may comprise butyrate biosynthesis genes from a different species, strain, or substrain of bacteria, or a combination of butyrate biosynthesis genes from different species, strains, and/or substrains of bacteria. A butyrogenic gene cassette may comprise, for example, the eight genes of the butyrate production pathway from Peptoclostridium difficile (also called Clostridium difficile): bcd2, etfB3, etfA3, thiA1, hbd, crt2, pbt, and buk, which encode butyryl-CoA dehydrogenase subunit, electron transfer flavoprotein subunit beta, electron transfer flavoprotein subunit alpha, acetyl-CoA C-acetyltransferase, 3-hydroxybutyryl-CoA dehydrogenase, crotonase, phosphate butyryltransferase, and butyrate kinase, respectively (Aboulnaga et al., 2013). One or more of the butyrate biosynthesis genes may be functionally replaced or modified, e.g., codon optimized. Peptoclostridium difficile strain 630 and strain 1296 are both capable of producing butyrate, but comprise different nucleic acid sequences for etfA3, thiA1, hbd, crt2, pbt, and buk. A butyrogenic gene cassette may comprise bcd2, etfB3, etfA3, and thiA1 from Peptoclostridium difficile strain 630, and hbd, crt2, pbt, and buk from Peptoclostridium difficile strain 1296. Alternatively, a single gene from Treponema denticola (ter, encoding trans-2-enoynl-CoA reductase) is capable of functionally replacing all three of the bcd2, etfB3, and etfA3 genes from Peptoclostridium difficile. Thus, a butyrogenic gene cassette may comprise thiA1, hbd, crt2, pbt, and buk from Peptoclostridium difficile and ter from Treponema denticola. The butyrogenic gene cassette may comprise genes for the aerobic biosynthesis of butyrate and/or genes for the anaerobic or microaerobic biosynthesis of butyrate. In another example of a butyrate gene cassette, the pbt and buk genes are replaced with tesB (e.g., from E. coli). Thus a butyrogenic gene cassette may comprise ter, thiA1, hbd, crt2, and tesB.

[0149] Likewise, a “propionate gene cassette” or “propionate operon” refers to a set of genes capable of producing propionate in a biosynthetic pathway. Unmodified bacteria that are capable of producing propionate via an endogenous propionate biosynthesis pathway include, but are not limited to, Clostridium propionicum, Megasphaera elsdenii, and Prevotella ruminicola. The genetically engineered bacteria of the invention may comprise propionate biosynthesis genes from a different species, strain, or substrain of bacteria, or a combination of propionate biosynthesis genes from different species, strains, and/or substrains of bacteria. In some embodiments, the propionate gene cassette comprises acrylate pathway propionate biosynthesis genes, e.g., pct, lcdA, lcdB, lcdC, etfA, acrB, and acrC, which encode propionate CoA-transferase, lactoyl-CoA dehydratase A, lactoyl-CoA dehydratase B, lactoyl-CoA dehydratase C, electron transfer flavoprotein subunit A, acryloyl-CoA reductase B, and acryloyl-CoA reductase C, respectively (Hetzel et al., 2003, Selmer et al., 2002, and Kandasamy 2012 Engineering Escherichia coli with acrylate pathway genes for propionic acid synthesis and its impact on mixed-acid fermentation). This operon catalyses the reduction of lactate to propionate. Dehydration of (R)-lactoyl-CoA leads to the production of the intermediate acryloyl-CoA by lactoyl-CoA dehydratase (LcdABC). Acrolyl-CoA is converted to propionyl-CoA by acrolyl-CoA reductase (EtfA, AcrBC). In some embodiments, the rate limiting step catalyzed by the enzymes encoded by etfA, acrB and acrC, are replaced by the acuI gene from R. sphaeroides. This gene product catalyzes the NADPH-dependent acrylyl-CoA reduction to produce propionyl-CoA (Acrylyl-Coenzyme A Reductase, an Enzyme Involved in the Assimilation of 3-Hydroxypropionate by Rhodobacter sphaeroides; Asao 2013). Thus the propionate cassette comprises pct, lcdA, lcdB, lcdC, and acuI. In another embodiment, the homolog of AcuI in E. coli, YhdH is used (see. e.g., Structure of Escherichia coli YhdH, a putative quinone oxidoreductase. Sulzenbacher 2004). This the propionate cassette comprises pct, lcdA, lcdB, lcdC, and yhdH. In alternate embodiments, the propionate gene cassette comprises pyruvate pathway propionate biosynthesis genes (see, e.g., Tseng et al., 2012), e.g., thrAfbr, thrB, thrC, ilvAfbr, aceE, aceF, and lpd, which encode homoserine dehydrogenase 1, homoserine kinase, L-threonine synthase, L-threonine dehydratase, pyruvate dehydrogenase, dihydrolipoamide acetyltrasferase, and dihydrolipoyl dehydrogenase, respectively. In some embodiments, the propionate gene cassette further comprises tesB, which encodes acyl-CoA thioesterase.

[0150] In another example of a propionate gene cassette comprises the genes of the Sleeping Beauty Mutase operon, e.g., from E. coli (sbm, ygfD, ygfG, ygfH). Recently, this pathway has been considered and utilized for the high yield industrial production of propionate from glycerol (Akawi et al., Engineering Escherichia coli for high-level production of propionate; J Ind Microbiol Biotechnol (2015) 42:1057-1072, the contents of which is herein incorporated by reference in its entirety). In addition, as described herein, it has been found that this pathway is also suitable for production of proprionate from glucose, e.g. by the genetically engineered bacteria of the disclosure. The SBM pathway is cyclical and composed of a series of biochemical conversions forming propionate as a fermentative product while regenerating the starting molecule of succinyl-CoA. Sbm (methylmalonyl-CoA mutase) converts succinyl CoA to L-methylmalonylCoA, YgfD is a Sbm-interacting protein kinase with GTPase activity, ygfG (methylmalonylCoA decarboxylase) converts L-methylmalonylCoA into PropionylCoA, and ygfH (propionyl-CoA/succinylCoA transferase) converts propionylCoA into propionate and succinate into succinylCoA (Sleeping beauty mutase (sbm) is expressed and interacts with ygfd in Escherichia coli; Froese 2009). This pathway is very similar to the oxidative propionate pathway of Propionibacteria, which also converts succinate to propionate. Succinyl-CoA is converted to R-methylmalonyl-CoA by methymalonyl-CoA mutase (mutAB). This is in turn converted to S-methylmalonyl-CoA via methymalonyl-CoA epimerase (GI:18042134). There are three genes which encode methylmalonyl-CoA carboxytransferase (mmdA, PFREUD_18870, bccp) which converts methylmalonyl-CoA to propionyl-CoA.

[0151] The propionate gene cassette may comprise genes for the aerobic biosynthesis of propionate and/or genes for the anaerobic or microaerobic biosynthesis of propionate. One or more of the propionate biosynthesis genes may be functionally replaced or modified, e.g., codon optimized.

[0152] An “acetate gene cassette” or “acetate operon” refers to a set of genes capable of producing acetate in a biosynthetic pathway. Bacteria “synthesize acetate from a number of carbon and energy sources,” including a variety of substrates such as cellulose, lignin, and inorganic gases, and utilize different biosynthetic mechanisms and genes, which are known in the art (Ragsdale et al., 2008). The genetically engineered bacteria of the invention may comprise acetate biosynthesis genes from a different species, strain, or substrain of bacteria, or a combination of acetate biosynthesis genes from different species, strains, and/or substrains of bacteria. Escherichia coli are capable of consuming glucose and oxygen to produce acetate and carbon dioxide during aerobic growth (Kleman et al., 1994). Several bacteria, such as Acetitomaculum, Acetoanaerobium, Acetohalobium, Acetonema, Balutia, Butyribacterium, Clostridium, Moorella, Oxobacter, Sporomusa, and Thermoacetogenium, are acetogenic anaerobes that are capable of converting CO or CO₂+H₂ into acetate, e.g., using the Wood-Ljungdahl pathway (Schiel-Bengelsdorf et al, 2012). Genes in the Wood-Ljungdahl pathway for various bacterial species are known in the art. The acetate gene cassette may comprise genes for the aerobic biosynthesis of acetate and/or genes for the anaerobic or microaerobic biosynthesis of acetate. One or more of the acetate biosynthesis genes may be functionally replaced or modified, e.g., codon optimized.

[0153] Each gene or gene cassette may be present on a plasmid or bacterial chromosome. In addition, multiple copies of any gene, gene cassette, or regulatory region may be present in the bacterium, wherein one or more copies of the gene, gene cassette, or regulatory region may be mutated or otherwise altered as described herein. In some embodiments, the genetically engineered bacteria are engineered to comprise multiple copies of the same gene, gene cassette, or regulatory region in order to enhance copy number or to comprise multiple different components of a gene cassette performing multiple different functions.

[0154] Each gene or gene cassette may be operably linked to a promoter that is induced under low-oxygen conditions. “Operably linked” refers a nucleic acid sequence, e.g., a gene or gene cassette for producing an anti-inflammatory or gut barrier enhancer molecule, that is joined to a regulatory region sequence in a manner which allows expression of the nucleic acid sequence, e.g., acts in cis. A regulatory region “Operably linked” refers to the association of nucleic acid sequences on a single nucleic acid fragment so that the function of one is affected by the other. A regulatory element is operably linked with a coding sequence when it is capable of affecting the expression of the gene coding sequence, regardless of the distance between the regulatory element and the coding sequence. More specifically, operably linked refers to a nucleic acid sequence, e.g., a gene encoding an anti-inflammatory or gut barrier enhancer molecule, that is joined to a regulatory sequence in a manner which allows expression of the nucleic acid sequence, e.g., the gene encoding the anti-inflammatory or gut barrier enhancer molecule. In other words, the regulatory sequence acts in cis. In one embodiment, a gene may be “directly linked” to a regulatory sequence in a manner which allows expression of the gene. In another embodiment, a gene may be “indirectly linked” to a regulatory sequence in a manner which allows expression of the gene. In one embodiment, two or more genes may be directly or indirectly linked to a regulatory sequence in a manner which allows expression of the two or more genes. A regulatory region or sequence is a nucleic acid that can direct transcription of a gene of interest and may comprise promoter sequences, enhancer sequences, response elements, protein recognition sites, inducible elements, promoter control elements, protein binding sequences, 5′ and 3′ untranslated regions, transcriptional start sites, termination sequences, polyadenylation sequences, and introns.

[0155] A “promoter” as used herein, refers to a nucleotide sequence that is capable of controlling the expression of a coding sequence or gene. Promoters are generally located 5′ of the sequence that they regulate. Promoters may be derived in their entirety from a native gene, or be composed of different elements derived from promoters found in nature, and/or comprise synthetic nucleotide segments. Those skilled in the art will readily ascertain that different promoters may regulate expression of a coding sequence or gene in response to a particular stimulus, e.g., in a cell- or tissue-specific manner, in response to different environmental or physiological conditions, or in response to specific compounds. Prokaryotic promoters are typically classified into two classes: inducible and constitutive. A “constitutive promoter” refers to a promoter that allows for continual transcription of the coding sequence or gene under its control.

[0156] “Constitutive promoter” refers to a promoter that is capable of facilitating continuous transcription of a coding sequence or gene under its control and/or to which it is operably linked. Constitutive promoters and variants are well known in the art and include, but are not limited to, Ptac promoter, BBa_J23100, a constitutive Escherichia coli σS promoter (e.g., an osmY promoter (International Genetically Engineered Machine (iGEM) Registry of Standard Biological Parts Name BBa_J45992; BBa_J45993)), a constitutive Escherichia coli σ32 promoter (e.g., htpG heat shock promoter (BBa_J45504)), a constitutive Escherichia coli σ70 promoter (e.g., lacq promoter (BBa_J54200; BBa_J56015), E. coli CreABCD phosphate sensing operon promoter (BBa_J64951), GlnRS promoter (BBa_K088007), lacZ promoter (BBa_K119000; BBa_K119001); M13K07 gene I promoter (BBa_M13101); M13K07 gene II promoter (BBa_M13102), M13K07 gene III promoter (BBa_M13103). M13K07 gene IV promoter (BBa_M13104), M13K07 gene V promoter (BBa_M13105), M13K07 gene VI promoter (BBa_M13106), M13K07 gene VIII promoter (BBa_M13108), M13110 (BBa_M113110)), a constitutive Bacillus subtilis σA promoter (e.g., promoter veg (BBa_K143013), promoter 43 (BBa_K143013), PliaG (BBa_K823000), PlepA (BBa_K823002), Pveg (BBa_K823003)), a constitutive Bacillus subtilis σB promoter (e.g., promoter ctc (BBa K143010), promoter gsiB (BBa K143011)), a Salmonella promoter (e.g., Pspv2 from Salmonella (BBa_K112706), Pspv from Salmonella (BBa_K112707)), a bacteriophage T7 promoter (e.g., T7 promoter (BBa_I712074; BBa_I719005; BBa_J34814; BBa_J64997: BBa_K113010; BBa_K113011; BBa_K113012; BBa_R0085: BBa_R0180; BBa_R0181; BBa_R0182; BBa_R0183; BBa_Z0251; BBa_Z0252; BBa_Z0253)), and a bacteriophage SP6 promoter (e.g., SP6 promoter (BBa_J64998)).

[0157] An “inducible promoter” refers to a regulatory region that is operably linked to one or more genes, wherein expression of the gene(s) is increased in the presence of an inducer of said regulatory region. An “inducible promoter” refers to a promoter that initiates increased levels of transcription of the coding sequence or gene under its control in response to a stimulus or an exogenous environmental condition. A “directly inducible promoter” refers to a regulatory region, wherein the regulatory region is operably linked to a gene encoding a protein or polypeptide, where, in the presence of an inducer of said regulatory region, the protein or polypeptide is expressed. An “indirectly inducible promoter” refers to a regulatory system comprising two or more regulatory regions, for example, a first regulatory region that is operably linked to a first gene encoding a first protein, polypeptide, or factor, e.g., a transcriptional regulator, which is capable of regulating a second regulatory region that is operably linked to a second gene, the second regulatory region may be activated or repressed, thereby activating or repressing expression of the second gene. Both a directly inducible promoter and an indirectly inducible promoter are encompassed by “inducible promoter.” Exemplary inducible promoters described herein include oxygen level-dependent promoters (e.g., FNR-inducible promoter), promoters induced by inflammation or an inflammatory response (RNS, ROS promoters), and promoters induced by a metabolite that may or may not be naturally present (e.g., can be exogenously added) in the gut, e.g., arabinose and tetracycline. Examples of inducible promoters include, but are not limited to, an FNR responsive promoter, a ParaC promoter, a ParaBAD promoter, and a PTetR promoter, each of which are described in more detail herein. Examples of other inducible promoters are provided herein below.

[0158] As used herein, “stably maintained” or “stable” bacterium is used to refer to a bacterial host cell carrying non-native genetic material, e.g., a gene encoding one or more anti-inflammation and/or gut barrier enhancer molecule(s), which is incorporated into the host genome or propagated on a self-replicating extra-chromosomal plasmid, such that the non-native genetic material is retained, expressed, and propagated. The stable bacterium is capable of survival and/or growth in vitro, e.g., in medium, and/or in vivo, e.g., in the gut. For example, the stable bacterium may be a genetically engineered bacterium comprising a gene encoding a encoding a payload, e.g., one or more anti-inflammation and/or gut barrier enhancer molecule(s), in which the plasmid or chromosome carrying the gene is stably maintained in the bacterium, such that the payload can be expressed in the bacterium, and the bacterium is capable of survival and/or growth in vitro and/or in vivo. In some embodiments, copy number affects the stability of expression of the non-native genetic material. In some embodiments, copy number affects the level of expression of the non-native genetic material.

[0159] As used herein, the term “expression” refers to the transcription and stable accumulation of sense (mRNA) or anti-sense RNA derived from a nucleic acid, and/or to translation of an mRNA into a polypeptide.

[0160] As used herein, the term “plasmid” or “vector” refers to an extrachromosomal nucleic acid, e.g., DNA, construct that is not integrated into a bacterial cell's genome. Plasmids are usually circular and capable of autonomous replication. Plasmids may be low-copy, medium-copy, or high-copy, as is well known in the art Plasmids may optionally comprise a selectable marker, such as an antibiotic resistance gene, which helps select for bacterial cells containing the plasmid and which ensures that the plasmid is retained in the bacterial cell. A plasmid disclosed herein may comprise a nucleic acid sequence encoding a heterologous gene, e.g., a gene encoding an anti-inflammatory or gut barrier enhancer molecule.

[0161] As used herein, the term “transform” or “transformation” refers to the transfer of a nucleic acid fragment into a host bacterial cell, resulting in genetically-stable inheritance. Host bacterial cells comprising the transformed nucleic acid fragment are referred to as “recombinant” or “transgenic” or “transformed” organisms.

[0162] The term “genetic modification,” as used herein, refers to any genetic change. Exemplary genetic modifications include those that increase, decrease, or abolish the expression of a gene, including, for example, modifications of native chromosomal or extrachromosomal genetic material. Exemplary genetic modifications also include the introduction of at least one plasmid, modification, mutation, base deletion, base addition, base substitution, and/or codon modification of chromosomal or extrachromosomal genetic sequence(s), gene over-expression, gene amplification, gene suppression, promoter modification or substitution, gene addition (either single or multi-copy), antisense expression or suppression, or any other change to the genetic elements of a host cell, whether the change produces a change in phenotype or not. Genetic modification can include the introduction of a plasmid, e.g., a plasmid comprising an anti-inflammatory or gut barrier enhancer molecule operably linked to a promoter, into a bacterial cell. Genetic modification can also involve a targeted replacement in the chromosome, e.g., to replace a native gene promoter with an inducible promoter, regulated promoter, strong promoter, or constitutive promoter. Genetic modification can also involve gene amplification, e.g., introduction of at least one additional copy of a native gene into the chromosome of the cell. Alternatively, chromosomal genetic modification can involve a genetic mutation.

[0163] As used herein, the term “genetic mutation” refers to a change or changes in a nucleotide sequence of a gene or related regulatory region that alters the nucleotide sequence as compared to its native or wild-type sequence. Mutations include, for example, substitutions, additions, and deletions, in whole or in part, within the wild-type sequence. Such substitutions, additions, or deletions can be single nucleotide changes (e.g., one or more point mutations), or can be two or more nucleotide changes, which may result in substantial changes to the sequence. Mutations can occur within the coding region of the gene as well as within the non-coding and regulatory sequence of the gene. The term “genetic mutation” is intended to include silent and conservative mutations within a coding region as well as changes which alter the amino acid sequence of the polypeptide encoded by the gene. A genetic mutation in a gene coding sequence may, for example, increase, decrease, or otherwise alter the activity (e.g., enzymatic activity) of the gene's polypeptide product. A genetic mutation in a regulatory sequence may increase, decrease, or otherwise alter the expression of sequences operably linked to the altered regulatory sequence.

[0164] As used herein, the term “transporter” is meant to refer to a mechanism, e.g., protein, proteins, or protein complex, for importing a molecule, e.g., amino acid, peptide (di-peptide, tri-peptide, polypeptide, etc), toxin, metabolite, substrate, as well as other biomolecules into the microorganism from the extracellular milieu.

[0165] As used herein, the phrase “exogenous environmental condition” or “exogenous environment signal” refers to settings, circumstances, stimuli, or biological molecules under which a promoter described herein is directly or indirectly induced. The phrase “exogenous environmental conditions” is meant to refer to the environmental conditions external to the engineered microorganism, but endogenous or native to the host subject environment. Thus, “exogenous” and “endogenous” may be used interchangeably to refer to environmental conditions in which the environmental conditions are endogenous to a mammalian body, but external or exogenous to an intact microorganism cell. In some embodiments, the exogenous environmental conditions are specific to the gut of a mammal. In some embodiments, the exogenous environmental conditions are specific to the upper gastrointestinal tract of a mammal. In some embodiments, the exogenous environmental conditions are specific to the lower gastrointestinal tract of a mammal. In some embodiments, the exogenous environmental conditions are specific to the small intestine of a mammal. In some embodiments, the exogenous environmental conditions are low-oxygen, microaerobic, or anaerobic conditions, such as the environment of the mammalian gut. In some embodiments, exogenous environmental conditions are molecules or metabolites that are specific to the mammalian gut, e.g., propionate. In some embodiments, the exogenous environmental condition is a tissue-specific or disease-specific metabolite or molecule(s). In some embodiments, the exogenous environmental condition is specific to an inflammatory disease. In some embodiments, the exogenous environmental condition is a low-pH environment. In some embodiments, the genetically engineered microorganism of the disclosure comprises a pH-dependent promoter. In some embodiments, the genetically engineered microorganism of the disclosure comprise an oxygen level-dependent promoter. In some aspects, bacteria have evolved transcription factors that are capable of sensing oxygen levels. Different signaling pathways may be triggered by different oxygen levels and occur with different kinetics. An “oxygen level-dependent promoter” or “oxygen level-dependent regulatory region” refers to a nucleic acid sequence to which one or more oxygen level-sensing transcription factors is capable of binding, wherein the binding and/or activation of the corresponding transcription factor activates downstream gene expression.

[0166] Examples of oxygen level-dependent transcription factors include, but are not limited to, FNR (fumarate and nitrate reductase), ANR, and DNR. Corresponding FNR-responsive promoters, ANR (anaerobic nitrate respiration)-responsive promoters, and DNR (dissimilatory nitrate respiration regulator)-responsive promoters are known in the art (see, e.g., Castiglione et al., 2009; Eiglmeier et al., 1989; Galimand et al., 1991; Hasegawa et al., 1998; Hoeren et al., 1993; Salmon et al., 2003), and non-limiting examples are shown in Table 1A.

[0167] In a non-limiting example, a promoter (PfnrS) was derived from the E. coli Nissle fumarate and nitrate reductase gene S (fnrS) that is known to be highly expressed under conditions of low or no environmental oxygen (Durand and Storz, 2010; Boysen et al, 2010). The PfnrS promoter is activated under anaerobic conditions by the global transcriptional regulator FNR that is naturally found in Nissle. Under anaerobic conditions, FNR forms a dimer and binds to specific sequences in the promoters of specific genes under its control, thereby activating their expression. However, under aerobic conditions, oxygen reacts with iron-sulfur clusters in FNR dimers and converts them to an inactive form. In this way, the PfnrS inducible promoter is adopted to modulate the expression of proteins or RNA. PfnrS is used interchangeably in this application as FNRS, fnrs, FNR, P-FNRS promoter and other such related designations to indicate the promoter PfnrS.

TABLE 1A
Examples of transcription factors and
responsive genes and regulatory regions

| Transcription | Examples of responsive genes, |
|---|---|
| Factor | promoters, and/or regulatory regions: |
| FNR | nirB, ydfZ, pdhR, focA, ndH, hlyE, narK, |
| | narX, narG, yfiD, tdcD |
| ANR | arcDABC |
| DNR | norb, norC |

[0168] As used herein, a “tunable regulatory region” refers to a nucleic acid sequence under direct or indirect control of a transcription factor and which is capable of activating, repressing, derepressing, or otherwise controlling gene expression relative to levels of an inducer. In some embodiments, the tunable regulatory region comprises a promoter sequence. The inducer may be RNS, or other inducer described herein, and the tunable regulatory region may be a RNS-responsive regulatory region or other responsive regulatory region described herein. The tunable regulatory region may be operatively linked to a gene sequence(s) or gene cassette for the production of one or more payloads, e.g., a butyrogenic or other gene cassette or gene sequence(s). For example, in one specific embodiment, the tunable regulatory region is a RNS-derepressible regulatory region, and when RNS is present, a RNS-sensing transcription factor no longer binds to and/or represses the regulatory region, thereby permitting expression of the operatively linked gene or gene cassette. In this instance, the tunable regulatory region derepresses gene or gene cassette expression relative to RNS levels. Each gene or gene cassette may be operatively linked to a tunable regulatory region that is directly or indirectly controlled by a transcription factor that is capable of sensing at least one RNS.

[0169] In some embodiments, the exogenous environmental conditions are the presence or absence of reactive oxygen species (ROS). In other embodiments, the exogenous environmental conditions are the presence or absence of reactive nitrogen species (RNS). In some embodiments, exogenous environmental conditions are biological molecules that are involved in the inflammatory response, for example, molecules present in an inflammatory disorder of the gut. In some embodiments, the exogenous environmental conditions or signals exist naturally or are naturally absent in the environment in which the recombinant bacterial cell resides. In some embodiments, the exogenous environmental conditions or signals are artificially created, for example, by the creation or removal of biological conditions and/or the administration or removal of biological molecules.

[0170] In some embodiments, the exogenous environmental condition(s) and/or signal(s) stimulates the activity of an inducible promoter. In some embodiments, the exogenous environmental condition(s) and/or signal(s) that serves to activate the inducible promoter is not naturally present within the gut of a mammal. In some embodiments, the inducible promoter is stimulated by a molecule or metabolite that is administered in combination with the pharmaceutical composition of the disclosure, for example, tetracycline, arabinose, or any biological molecule that serves to activate an inducible promoter. In some embodiments, the exogenous environmental condition(s) and/or signal(s) is added to culture media comprising a recombinant bacterial cell of the disclosure. In some embodiments, the exogenous environmental condition that serves to activate the inducible promoter is naturally present within the gut of a mammal (for example, low oxygen or anaerobic conditions, or biological molecules involved in an inflammatory response). In some embodiments, the loss of exposure to an exogenous environmental condition (for example, in vivo) inhibits the activity of an inducible promoter, as the exogenous environmental condition is not present to induce the promoter (for example, an aerobic environment outside the gut). “Gut” refers to the organs, glands, tracts, and systems that are responsible for the transfer and digestion of food, absorption of nutrients, and excretion of waste. In humans, the gut comprises the gastrointestinal (GI) tract, which starts at the mouth and ends at the anus, and additionally comprises the esophagus, stomach, small intestine, and large intestine. The gut also comprises accessory organs and glands, such as the spleen, liver, gallbladder, and pancreas. The upper gastrointestinal tract comprises the esophagus, stomach, and duodenum of the small intestine. The lower gastrointestinal tract comprises the remainder of the small intestine, i.e., the jejunum and ileum, and all of the large intestine, i.e., the cecum, colon, rectum, and anal canal. Bacteria can be found throughout the gut, e.g., in the gastrointestinal tract, and particularly in the intestines.

[0171] As used herein, the term “low oxygen” is meant to refer to a level, amount, or concentration of oxygen (O₂) that is lower than the level, amount, or concentration of oxygen that is present in the atmosphere (e.g., <21% O₂:<160 torr O₂). Thus, the term “low oxygen condition or conditions” or “low oxygen environment” refers to conditions or environments containing lower levels of oxygen than are present in the atmosphere. In some embodiments, the term “low oxygen” is meant to refer to the level, amount, or concentration of oxygen (O₂) found in a mammalian gut, e.g., lumen, stomach, small intestine, duodenum, jejunum, ileum, large intestine, cecum, colon, distal sigmoid colon, rectum, and anal canal. In some embodiments, the term “low oxygen” is meant to refer to a level, amount, or concentration of O₂ that is 0-60 mmHg O₂ (0-60 torr O₂) (e.g., 0, 1, 2, 3, 4, 5, 6, 7, 8, 9, 10, 11, 12, 13, 14, 15, 16, 17, 18, 19, 20, 21, 22, 23, 24, 25, 26, 27, 28, 29, 30, 31, 32, 33, 34, 35, 36, 37, 38, 39, 40, 41, 42, 43, 44, 45, 46, 47, 48, 49, 50, 51, 52, 53, 54, 55, 56, 57, 58, 59, and 60 mmHg O₂), including any and all incremental fraction(s) thereof (e.g., 0.2 mmHg, 0.5 mmHg O₂, 0.75 mmHg O₂, 1.25 mmHg O₂, 2.175 mmHg O₂, 3.45 mmHg O₂, 3.75 mmHg O₂, 4.5 mmHg O₂, 6.8 mmHg O₂, 11.35 mmHg O₂, 46.3 mmHg O₂, 58.75 mmHg, etc., which exemplary fractions are listed here for illustrative purposes and not meant to be limiting in any way). In some embodiments, “low oxygen” refers to about 60 mmHg O₂ or less (e.g., 0 to about 60 mmHg O₂). The term “low oxygen” may also refer to a range of O₂ levels, amounts, or concentrations between 0-60 mmHg O₂ (inclusive), e.g., 0-5 mmHg O₂, <1.5 mmHg O₂, 6-10 mmHg, <8 mmHg, 47-60 mmHg, etc. which listed exemplary ranges are listed here for illustrative purposes and not meant to be limiting in any way. See, for example, Albenberg et al., Gastroenterology, 147(5): 1055-1063 (2014); Bergofsky et al., J Clin. Invest., 41(11): 1971-1980 (1962); Crompton et al., J Exp. Biol., 43: 473-478 (1965); He et al., PNAS (USA), 96: 4586-4591 (1999); McKeown, Br. J. Radiol., 87:20130676 (2014) (doi: 10.1259/brj.20130676), each of which discusses the oxygen levels found in the mammalian gut of various species and each of which are incorporated by reference herewith in their entireties. In some embodiments, the term “low oxygen” is meant to refer to the level, amount, or concentration of oxygen (O₂) found in a mammalian organ or tissue other than the gut, e.g., urogenital tract, tumor tissue, etc. in which oxygen is present at a reduced level, e.g., at a hypoxic or anoxic level. In some embodiments, “low oxygen” is meant to refer to the level, amount, or concentration of oxygen (O₂) present in partially aerobic, semi aerobic, microaerobic, nanoaerobic, microoxic, hypoxic, anoxic, and/or anaerobic conditions. For example, Table 1B summarizes the amount of oxygen present in various organs and tissues. In some embodiments, the level, amount, or concentration of oxygen (O₂) is expressed as the amount of dissolved oxygen (“DO”) which refers to the level of free, non-compound oxygen (O₂) present in liquids and is typically reported in milligrams per liter (mg/L), parts per million (ppm; 1 mg/L=1 ppm), or in micromoles (umole) (1 umole O₂=0.022391 mg/L O₂). Fondriest Environmental, Inc., “Dissolved Oxygen”, Fundamentals of Environmental Measurements, 19 Nov. 2013, www.fondriest.com/environmental-measurements/parameters/water-quality/dissolved-oxygen/>. In some embodiments, the term “low oxygen” is meant to refer to a level, amount, or concentration of oxygen (O₂) that is about 6.0 mg/L DO or less, e.g., 6.0 mg/L, 5.0 mg/L, 4.0 mg/L, 3.0 mg/L, 2.0 mg/L, 1.0 mg/L, or 0 mg/L, and any fraction therein, e.g., 3.25 mg/L, 2.5 mg/L, 1.75 mg/L, 1.5 mg/L, 1.25 mg/L, 0.9 mg/L, 0.8 mg/L, 0.7 mg/L, 0.6 mg/L, 0.5 mg/L, 0.4 mg/L, 0.3 mg/L, 0.2 mg/L and 0.1 mg/L DO, which exemplary fractions are listed here for illustrative purposes and not meant to be limiting in any way. The level of oxygen in a liquid or solution may also be reported as a percentage of air saturation or as a percentage of oxygen saturation (the ratio of the concentration of dissolved oxygen (O₂) in the solution to the maximum amount of oxygen that will dissolve in the solution at a certain temperature, pressure, and salinity under stable equilibrium). Well-aerated solutions (e.g., solutions subjected to mixing and/or stirring) without oxygen producers or consumers are 100% air saturated. In some embodiments, the term “low oxygen” is meant to refer to 40% air saturation or less, e.g., 40%, 39%, 38%, 37%, 36%, 35%, 34%, 33%, 32%, 31%, 30%, 29%, 28%, 27%, 26%, 25%, 24%, 23%, 22%, 21%, 20%, 19%, 18%, 17%, 16%, 15%, 14%, 13%, 12%, 11%, 10%, 9%, 8%, 7%, 6%, 5%, 4%, 3%, 2%, 1%, and 0% air saturation, including any and all incremental fraction(s) thereof (e.g., 30.25%, 22.70%, 15.5%, 7.7%, 5.0%, 2.8%, 2.0%, 1.65%, 1.0%, 0.9%, 0.8%, 0.75%, 0.68%, 0.5%. 0.44%, 0.3%, 0.25%, 0.2%, 0.1%, 0.08%, 0.075%, 0.058%, 0.04%. 0.032%, 0.025%, 0.01%, etc.) and any range of air saturation levels between 0-40%, inclusive (e.g., 0-5%, 0.05-0.1%, 0.1-0.2%, 0.1-0.5%, 0.5-2.0%, 0-10%, 5-10%, 10-15%, 15-20%, 20-25%, 25-30%, etc.). The exemplary fractions and ranges listed here are for illustrative purposes and not meant to be limiting in any way. In some embodiments, the term “low oxygen” is meant to refer to 9% O₂ saturation or less, e.g., 9%, 8%, 7%, 6%, 5%, 4%, 3%, 2%, 1%, 0%, O₂ saturation, including any and all incremental fraction(s) thereof (e.g., 6.5%, 5.0%, 2.2%, 1.7%, 1.4%, 0.9%, 0.8%, 0.75%, 0.68%, 0.5%. 0.44%, 0.3%, 0.25%, 0.2%, 0.1%, 0.08%, 0.075%, 0.058%, 0.04%. 0.032%, 0.025%, 0.01%, etc.) and any range of O₂ saturation levels between 0-9%, inclusive (e.g., 0-5%, 0.05-0.1%, 0.1-0.2%, 0.1-0.5%, 0.5-2.0%, 0-8%, 5-7%, 0.3-4.2% O₂. etc.). The exemplary fractions and ranges listed here are for illustrative purposes and not meant to be limiting in any way.

TABLE 1B

| Compartment | Oxygen Tension |
|---|---|
| stomach | ~60 torr (e.g., 58 +/− 15 torr) |
| duodenum and first part of | ~30 torr (e.g., 32 +/− 8 torr); |
| jejunum | ~20% oxygen in ambient air |
| Ileum (mid- small intestine) | ~10 torr; ~6% oxygen in ambient air |
| | (e.g., 11 +/− 3 torr) |
| Distal sigmoid colon | ~3 torr (e.g., 3 +/− 1 torr) |
| colon | <2 torr |
| Lumen of cecum | <1 torr |
| tumor | <32 torr (most tumors are <15 torr) |

[0172] “Microorganism” refers to an organism or microbe of microscopic, submicroscopic, or ultramicroscopic size that typically consists of a single cell. Examples of microrganisms include bacteria, viruses, parasites, fungi, certain algae, yeast, e.g., Saccharomyces, and protozoa. In some aspects, the microorganism is engineered (“engineered microorganism”) to produce one or more therapeutic molecules, e.g., an antiinflammatory or barrier enhancer molecule. In certain embodiments, the engineered microorganism is an engineered bacterium. In certain embodiments, the engineered microorganism is an engineered virus.

[0173] “Non-pathogenic bacteria” refer to bacteria that are not capable of causing disease or harmful responses in a host. In some embodiments, non-pathogenic bacteria are Gram-negative bacteria. In some embodiments, non-pathogenic bacteria are Gram-positive bacteria. In some embodiments, non-pathogenic bacteria do not contain lipopolysaccharides (LPS). In some embodiments, non-pathogenic bacteria are commensal bacteria. Examples of non-pathogenic bacteria include, but are not limited to certain strains belonging to the genus Bacillus, Bacteroides, Bifidobacterium, Brevibacteria, Clostridium, Enterococcus, Escherichia coli, Lactobacillus, Lactococcus, Saccharomyces, and Staphylococcus, e.g., Bacillus coagulans, Bacillus subtilis, Bacteroides fragilis, Bacteroides subtilis, Bacteroides thetaiotaomicron, Bifidobacterium bifidum, Bifidobacterium infantis, Bifidobacterium lactis, Bifidobacterium longum, Clostridium butyricum, Enterococcus faecium, Escherichia coli, Escherichia coli Nissle, Lactobacillus acidophilus, Lactobacillus bulgaricus, Lactobacillus casei, Lactobacillus johnsonii, Lactobacillus paracasei, Lactobacillus plantarum, Lactobacillus reuteri, Lactobacillus rhamnosus, Lactococcus lactis and, Saccharomyces boulardii (Sonnenborn et al., 2009; Dinleyici et al., 2014; U.S. Pat. Nos. 6,835,376; 6,203,797; 5,589,168; 7,731,976). Non-pathogenic bacteria also include commensal bacteria, which are present in the indigenous microbiota of the gut. In one embodiment, the disclosure further includes non-pathogenic Saccharomyces, such as Saccharomyces boulardii. Naturally pathogenic bacteria may be genetically engineered to reduce or eliminate pathogenicity.

[0174] “Probiotic” is used to refer to live, non-pathogenic microorganisms, e.g., bacteria, which can confer health benefits to a host organism that contains an appropriate amount of the microorganism. In some embodiments, the host organism is a mammal. In some embodiments, the host organism is a human. In some embodiments, the probiotic bacteria are Gram-negative bacteria. In some embodiments, the probiotic bacteria are Gram-positive bacteria. Some species, strains, and/or subtypes of non-pathogenic bacteria are currently recognized as probiotic bacteria. Examples of probiotic bacteria include, but are not limited to, certain strains belonging to the genus Bifidobacteria, Escherichia coli, Lactobacillus, and Saccharomyces e.g., Bifidobacterium bifidum, Enterococcus faecium, Escherichia coli strain Nissle, Lactobacillus acidophilus, Lactobacillus bulgaricus, Lactobacillus paracasei, and Lactobacillus plantarum, and Saccharomyces boulardii (Dinleyici et al., 2014; U.S. Pat. Nos. 5,589,168; 6,203,797; 6,835,376). The probiotic may be a variant or a mutant strain of bacterium (Arthur et al., 2012; Cuevas-Ramos et al., 2010; Olier et al., 2012; Nougayrede et al., 2006). Non-pathogenic bacteria may be genetically engineered to enhance or improve desired biological properties, e.g., survivability. Non-pathogenic bacteria may be genetically engineered to provide probiotic properties. Probiotic bacteria may be genetically engineered to enhance or improve probiotic properties.

[0175] As used herein, the term “modulate” and its cognates means to alter, regulate, or adjust positively or negatively a molecular or physiological readout, outcome, or process, to effect a change in said readout, outcome, or process as compared to a normal, average, wild-type, or baseline measurement. Thus, for example, “modulate” or “modulation” includes up-regulation and down-regulation. A non-limiting example of modulating a readout, outcome, or process is effecting a change or alteration in the normal or baseline functioning, activity, expression, or secretion of a biomolecule (e.g. a protein, enzyme, cytokine, growth factor, hormone, metabolite, short chain fatty acid, or other compound). Another non-limiting example of modulating a readout, outcome, or process is effecting a change in the amount or level of a biomolecule of interest, e.g. in the serum and/or the gut lumen. In another non-limiting example, modulating a readout, outcome, or process relates to a phenotypic change or alteration in one or more disease symptoms. Thus, “modulate” is used to refer to an increase, decrease, masking, altering, overriding or restoring the normal functioning, activity, or levels of a readout, outcome or process (e.g, biomolecule of interest, and/or molecular or physiological process, and/or a phenotypic change in one or more disease symptoms).

[0176] As used herein, the term “auxotroph” or “auxotrophic” refers to an organism that requires a specific factor, e.g., an amino acid, a sugar, or other nutrient) to support its growth. An “auxotrophic modification” is a genetic modification that causes the organism to die in the absence of an exogenously added nutrient essential for survival or growth because it is unable to produce said nutrient. As used herein, the term “essential gene” refers to a gene which is necessary to for cell growth and/or survival. Essential genes are described in more detail infra and include, but are not limited to, DNA synthesis genes (such as thrA), cell wall synthesis genes (such as dapA), and amino acid genes (such as serA and metA).

[0177] As used herein, the terms “modulate” and “treat” a disease and their cognates refer to an amelioration of a disease, disorder, and/or condition, or at least one discernible symptom thereof. In another embodiment, “modulate” and “treat” refer to an amelioration of at least one measurable physical parameter, not necessarily discernible by the patient. In another embodiment, “modulate” and “treat” refer to inhibiting the progression of a disease, disorder, and/or condition, either physically (e.g., stabilization of a discernible symptom), physiologically (e.g., stabilization of a physical parameter), or both. In another embodiment, “modulate” and “treat” refer to slowing the progression or reversing the progression of a disease, disorder, and/or condition. As used herein, “prevent” and its cognates refer to delaying the onset or reducing the risk of acquiring a given disease, disorder and/or condition or a symptom associated with such disease, disorder, and/or condition.

[0178] Those in need of treatment may include individuals already having a particular medical disorder, as well as those at risk of having, or who may ultimately acquire the disorder. The need for treatment is assessed, for example, by the presence of one or more risk factors associated with the development of a disorder, the presence or progression of a disorder, or likely receptiveness to treatment of a subject having the disorder. Treating autoimmune disorders and/or diseases and conditions associated with gut inflammation and/or compromised gut barrier function may encompass reducing or eliminating excess inflammation and/or associated symptoms, and does not necessarily encompass the elimination of the underlying disease.

[0179] Treating the diseases described herein may encompass increasing levels of butyrate, increasing levels of acetate, increasing levels of butyrate and increasing GLP-2, IL-22, and/o rIL-10, and/or modulating levels of tryptophan and/or its metabolites (e.g., kynurenine), and/or providing any other anti-inflammation and/or gut barrier enhancer molecule and does not necessarily encompass the elimination of the underlying disease.

[0180] As used herein a “pharmaceutical composition” refers to a preparation of genetically engineered microorganism of the disclosure, e.g., genetically engineered bacteria or virus, with other components such as a physiologically suitable carrier and/or excipient.

[0181] The phrases “physiologically acceptable carrier” and “pharmaceutically acceptable carrier” which may be used interchangeably refer to a carrier or a diluent that does not cause significant irritation to an organism and does not abrogate the biological activity and properties of the administered bacterial or viral compound. An adjuvant is included under these phrases.

[0182] The term “excipient” refers to an inert substance added to a pharmaceutical composition to further facilitate administration of an active ingredient. Examples include, but are not limited to, calcium bicarbonate, sodium bicarbonate calcium phosphate, various sugars and types of starch, cellulose derivatives, gelatin, vegetable oils, polyethylene glycols, and surfactants, including, for example, polysorbate 20.

[0183] The terms “therapeutically effective dose” and “therapeutically effective amount” are used to refer to an amount of a compound that results in prevention, delay of onset of symptoms, or amelioration of symptoms of a condition, e.g., inflammation, diarrhea an autoimmune disorder. A therapeutically effective amount may, for example, be sufficient to treat, prevent, reduce the severity, delay the onset, and/or reduce the risk of occurrence of one or more symptoms of an autoimmune a disorder and/or a disease or condition associated with gut inflammation and/or compromised gut barrier function. A therapeutically effective amount, as well as a therapeutically effective frequency of administration, can be determined by methods known in the art and discussed below.

[0184] As used herein, the term “bacteriostatic” or “cytostatic” refers to a molecule or protein which is capable of arresting, retarding, or inhibiting the growth, division, multiplication or replication of recombinant bacterial cell of the disclosure.

[0185] As used herein, the term “bactericidal” refers to a molecule or protein which is capable of killing the recombinant bacterial cell of the disclosure.

[0186] As used herein, the term “toxin” refers to a protein, enzyme, or polypeptide fragment thereof, or other molecule which is capable of arresting, retarding, or inhibiting the growth, division, multiplication or replication of the recombinant bacterial cell of the disclosure, or which is capable of killing the recombinant bacterial cell of the disclosure. The term “toxin” is intended to include bacteriostatic proteins and bactericidal proteins. The term “toxin” is intended to include, but not limited to, lytic proteins, bacteriocins (e.g., microcins and colicins), gyrase inhibitors, polymerase inhibitors, transcription inhibitors, translation inhibitors, DNases, and RNases. The term “anti-toxin” or “antitoxin,” as used herein, refers to a protein or enzyme which is capable of inhibiting the activity of a toxin. The term anti-toxin is intended to include, but not limited to, immunity modulators, and inhibitors of toxin expression. Examples of toxins and antitoxins are known in the art and described in more detail in/i a.

[0187] As used herein, “payload” refers to one or more molecules of interest to be produced by a genetically engineered microorganism, such as a bacteria or a virus. In some embodiments, the payload is a therapeutic payload, e.g. and antiinflammatory or gut barrier enhancer molecule, e.g. butyrate, acetate, propionate, GLP-2, IL-10, IL-22, IL-2, other interleukins, and/or tryptophan and/or one or more of its metabolites. In some embodiments, the payload is a regulatory molecule, e.g., a transcriptional regulator such as FNR. In some embodiments, the payload comprises a regulatory element, such as a promoter or a repressor. In some embodiments, the payload comprises an inducible promoter, such as from FNRS. In some embodiments the payload comprises a repressor element, such as a kill switch. In some embodiments the payload comprises an antibiotic resistance gene or genes. In some embodiments, the payload is encoded by a gene, multiple genes, gene cassette, or an operon. In alternate embodiments, the payload is produced by a biosynthetic or biochemical pathway, wherein the biosynthetic or biochemical pathway may optionally be endogenous to the microorganism. In alternate embodiments, the payload is produced by a biosynthetic or biochemical pathway, wherein the biosynthetic or biochemical pathway is not endogenous to the microorganism. In some embodiments, the genetically engineered microorganism comprises two or more payloads.

[0188] As used herein, the term “conventional treatment” or “conventional therapy” refers to treatment or therapy that is currently accepted, considered current standard of care, and/or used by most healthcare professionals for treating a disease or disorder associated with BCAA. It is different from alternative or complementary therapies, which are not as widely used.

[0189] As used herein, the term “polypeptide” includes “polypeptide” as well as “polypeptides,” and refers to a molecule composed of amino acid monomers linearly linked by amide bonds (i.e., peptide bonds). The term “polypeptide” refers to any chain or chains of two or more amino acids, and does not refer to a specific length of the product. Thus, “peptides,” “dipeptides,” “tripeptides, “oligopeptides,” “protein,” “amino acid chain,” or any other term used to refer to a chain or chains of two or more amino acids, are included within the definition of“polypeptide,” and the term “polypeptide” may be used instead of, or interchangeably with any of these terms. The term “polypeptide” is also intended to refer to the products of post-expression modifications of the polypeptide, including but not limited to glycosylation, acetylation, phosphorylation, amidation, derivatization, proteolytic cleavage, or modification by non-naturally occurring amino acids. A polypeptide may be derived from a natural biological source or produced by recombinant technology. In other embodiments, the polypeptide is produced by the genetically engineered bacteria or virus of the current invention. A polypeptide of the invention may be of a size of about 3 or more, 5 or more, 10 or more, 20 or more, 25 or more, 50 or more, 75 or more, 100 or more, 200 or more, 500 or more, 1,000 or more, or 2,000 or more amino acids. Polypeptides may have a defined three-dimensional structure, although they do not necessarily have such structure. Polypeptides with a defined three-dimensional structure are referred to as folded, and polypeptides, which do not possess a defined three-dimensional structure, but rather can adopt a large number of different conformations, are referred to as unfolded. The term “peptide” or “polypeptide” may refer to an amino acid sequence that corresponds to a protein or a portion of a protein or may refer to an amino acid sequence that corresponds with non-protein sequence, e.g., a sequence selected from a regulatory peptide sequence, leader peptide sequence, signal peptide sequence, linker peptide sequence, and other peptide sequence.

[0190] An “isolated” polypeptide or a fragment, variant, or derivative thereof refers to a polypeptide that is not in its natural milieu. No particular level of purification is required. Recombinantly produced polypeptides and proteins expressed in host cells, including but not limited to bacterial or mammalian cells, are considered isolated for purposed of the invention, as are native or recombinant polypeptides which have been separated, fractionated, or partially or substantially purified by any suitable technique. Recombinant peptides, polypeptides or proteins refer to peptides, polypeptides or proteins produced by recombinant DNA techniques, i.e. produced from cells, microbial or mammalian, transformed by an exogenous recombinant DNA expression construct encoding the polypeptide. Proteins or peptides expressed in most bacterial cultures will typically be free of glycan. Fragments, derivatives, analogs or variants of the foregoing polypeptides, and any combination thereof are also included as polypeptides. The terms “fragment,” “variant,” “derivative” and “analog” include polypeptides having an amino acid sequence sufficiently similar to the amino acid sequence of the original peptide and include any polypeptides, which retain at least one or more properties of the corresponding original polypeptide. Fragments of polypeptides of the present invention include proteolytic fragments, as well as deletion fragments. Fragments also include specific antibody or bioactive fragments or immunologically active fragments derived from any polypeptides described herein. Variants may occur naturally or be non-naturally occurring. Non-naturally occurring variants may be produced using mutagenesis methods known in the art. Variant polypeptides may comprise conservative or non-conservative amino acid substitutions, deletions or additions.

[0191] Polypeptides also include fusion proteins. As used herein, the term “variant” includes a fusion protein, which comprises a sequence of the original peptide or sufficiently similar to the original peptide. As used herein, the term “fusion protein” refers to a chimeric protein comprising amino acid sequences of two or more different proteins. Typically, fusion proteins result from well known in vitro recombination techniques. Fusion proteins may have a similar structural function (but not necessarily to the same extent), and/or similar regulatory function (but not necessarily to the same extent), and/or similar biochemical function (but not necessarily to the same extent) and/or immunological activity (but not necessarily to the same extent) as the individual original proteins which are the components of the fusion proteins. “Derivatives” include but are not limited to peptides, which contain one or more naturally occurring amino acid derivatives of the twenty standard amino acids. “Similarity” between two peptides is determined by comparing the amino acid sequence of one peptide to the sequence of a second peptide. An amino acid of one peptide is similar to the corresponding amino acid of a second peptide if it is identical or a conservative amino acid substitution. Conservative substitutions include those described in Dayhoff, M. O., ed., The Atlas of Protein Sequence and Structure 5, National Biomedical Research Foundation, Washington, D.C. (1978), and in Argos, EMBO J. 8 (1989), 779-785. For example, amino acids belonging to one of the following groups represent conservative changes or substitutions: -Ala, Pro, Gly, Gln, Asn, Ser, Thr; -Cys, Ser, Tyr, Thr; -Val, Ile, Leu, Met, Ala, Phe; -Lys, Arg, His; -Phe, Tyr, Trp, His; and -Asp, Glu.

[0192] An antibody generally refers to a polypeptide of the immunoglobulin family or a polypeptide comprising fragments of an immunoglobulin that is capable of noncovalently, reversibly, and in a specific manner binding a corresponding antigen. An exemplary antibody structural unit comprises a tetramer. Each tetramer is composed of two identical pairs of polypeptide chains, each pair having one “light” (about 25 kD) and one “heavy” chain (about 50-70 kD), connected through a disulfide bond. The recognized immunoglobulin genes include the κ, λ, α, γ, δ, ε, and μ constant region genes, as well as the myriad immunoglobulin variable region genes. Light chains are classified as either κ or λ. Heavy chains are classified as γ, μ, α, δ, or ε, which in turn define the immunoglobulin classes, IgG, IgM, IgA, IgD, and IgE, respectively. The N-terminus of each chain defines a variable region of about 100 to 110 or more amino acids primarily responsible for antigen recognition. The terms variable light chain (VL) and variable heavy chain (VH) refer to these regions of light and heavy chains respectively.

[0193] As used herein, the term “antibody” or “antibodies” is meant to encompasses all variations of antibody and fragments thereof that possess one or more particular binding specificities. Thus, the term “antibody” or “antibodies” is meant to include full length antibodies, chimeric antibodies, humanized antibodies, single chain antibodies (ScFv, camelids), Fab, Fab′, multimeric versions of these fragments (e.g., F(ab′)2), single domain antibodies (sdAB, VHH framents), heavy chain antibodies (HCAb), nanobodies, diabodies, and minibodies. Antibodies can have more than one binding specificity, e.g., be bispecific. The term “antibody” is also meant to include so-called antibody mimetics. Antibody mimetics refers to small molecules, e.g., 3-30 kDa, which can be single amino acid chain molecules, which can specifically bind antigens but do not have an antibody-related structure. Antibody mimetics, include, but are not limited to, Affibody molecules (Z domain of Protein A), Affilins (Gamma-B crystalline), Ubiquitin, Affimers (Cystatin), Affitins (Sac7d (from Sulfolobus acidocaldarius), Alphabodies (Triple helix coiled coil), Anticalins (Lipocalins), Avimers (domains of various membrane receptors), DARPins (Ankyrin repeat motif), Fynomers (SH3 domain of Fyn), Kunitz domain peptides Kunitz domains of various protease inhibitors), Ecallantide (Kalbitor), and Monobodies. In certain aspects, the term “antibody” or “antibodies” is meant to refer to a single chain antibody(ies), single domain antibody(ies), and camelid antibody(ies). Utility of antibodies in the treatment of cancer and additional anti cancer antibodies can for example be found in Scott et al., Antibody Therapy for Cancer, Nature Reviews Cancer April 2012 Volume 12, incorporated by reference in its entirety.

[0194] A “single-chain antibody” or “single-chain antibodies” typically refers to a peptide comprising a heavy chain of an immunoglobulin, a light chain of an immunoglobulin, and optionally a linker or bond, such as a disulfide bond. The single-chain antibody lacks the constant Fc region found in traditional antibodies. In some embodiments, the single-chain antibody is a naturally occurring single-chain antibody, e.g., a camelid antibody. In some embodiments, the single-chain antibody is a synthetic, engineered, or modified single-chain antibody. In some embodiments, the single-chain antibody is capable of retaining substantially the same antigen specificity as compared to the original immunoglobulin despite the addition of a linker and the removal of the constant regions. In some aspects, the single chain antibody can be a “scFv antibody”, which refers to a fusion protein of the variable regions of the heavy (VH) and light chains (VL) of immunoglobulins (without any constant regions), optionally connected with a short linker peptide of ten to about 25 amino acids, as described, for example, in U.S. Pat. No. 4,946,778, the contents of which is herein incorporated by reference in its entirety. The Fv fragment is the smallest fragment that holds a binding site of an antibody, which binding site may, in some aspects, maintain the specificity of the original antibody. Techniques for the production of single chain antibodies are described in U.S. Pat. No. 4,946,778. The Vh and VL sequences of the scFv can be connected via the N-terminus of the VH connecting to the C-terminus of the VL or via the C-terminus of the VH connecting to the N-terminus of the VL. ScFv fragments are independent folding entities that can be fused indistinctively on either end to other epitope tags or protein domains. Linkers of varying length can be used to link the Vh and VL sequences, which the linkers can be glycine rich (provides flexibility) and serine or threonine rich (increases solubility). Short linkers may prevent association of the two domains and can result in multimers (diabodies, tribodies, etc.). Long linkers may result in proteolysis or weak domain association (described in Voelkel et al el., 2011). Linkers of length between 15 and 20 amino acids or 18 and 20 amino acids are most often used. Additional non-limiting examples of linkers, including other flexible linkers are described in Chen et al., 2013 (Adv Drug Deliv Rev. 2013 Oct. 15; 65(10): 1357-1369. Fusion Protein Linkers: Property, Design and Functionality), the contents of which is herein incorporated by reference in its entirety. Flexible linkers are also rich in small or polar amino acids such as Glycine and Serine, but can contain additional amino acids such as Threonine and Alanine to maintain flexibility, as well as polar amino acids such as Lysine and Glutamate to improve solubility. Exemplary linkers include, but are not limited to, (Gly-Gly-Gly-Gly-Ser)n, KESGSVSSEQLAQFRSLD and EGKSSGSGSESKST, (Gly)8, and Gly and Ser rich flexible linker, GSAGSAAGSGEF. “Single chain antibodies” as used herein also include single-domain antibodies, which include camelid antibodies and other heavy chain antibodies, light chain antibodies, including nanobodies and single domains VH or VL domains derived from human, mouse or other species. Single domain antibodies may be derived from any species including, but not limited to mouse, human, camel, llama, fish, shark, goat, rabbit, and bovine. Single domain antibodies include domain antigen-binding units which have a camelid scaffold, derived from camels, llamas, or alpacas. Camelids produce functional antibodies devoid of light chains. The heavy chain variable (VH) domain folds autonomously and functions independently as an antigen-binding unit. Its binding surface involves only three CDRs as compared to the six CDRs in classical antigen-binding molecules (Fabs) or single chain variable fragments (scFvs). Camelid antibodies are capable of attaining binding affinities comparable to those of conventional antibodies. Camelid scaffold-based antibodies can be produced using methods well known in the art. Cartilaginous fishes also have heavy-chain antibodies (IgNAR, ‘immunoglobulin new antigen receptor’), from which single-domain antibodies called VNAR fragments can be obtained. Alternatively, the dimeric variable domains from IgG from humans or mice can be split into monomers. Nanobodies are single chain antibodies derived from light chains. The term “single chain antibody” also refers to antibody mimetics.

[0195] In some embodiments, the antibodies expressed by the engineered microorganisms are bispecific. In certain embodiments, a bispecific antibody molecule comprises a scFv, or fragment thereof, have binding specificity for a first epitope and a scFv, or fragment thereof, have binding specificity for a second epitope. Antigen-binding fragments or antibody portions include bivalent scFv (diabody), bispecific scFv antibodies where the antibody molecule recognizes two different epitopes, single binding domains (dAbs), and minibodies. Monomeric single-chain diabodies (scDb) are readily assembled in bacterial and mammalian cells and show improved stability under physiological conditions (Voelkel et al., 2001 and references therein; Protein Eng. (2001) 14 (10): 815-823 (describes optimized linker sequences for the expression of monomeric and dimeric bispecific single-chain diabodies).

[0196] As used herein, the term “sufficiently similar” means a first amino acid sequence that contains a sufficient or minimum number of identical or equivalent amino acid residues relative to a second amino acid sequence such that the first and second amino acid sequences have a common structural domain and/or common functional activity. For example, amino acid sequences that comprise a common structural domain that is at least about 45%, at least about 50%, at least about 55%, at least about 60%, at least about 65%, at least about 70%, at least about 75%, at least about 80%, at least about 85%, at least about 90%, at least about 91%, at least about 92%, at least about 93%, at least about 94%, at least about 95%, at least about 96%, at least about 97%, at least about 98%, at least about 99%, or at least about 100%, identical are defined herein as sufficiently similar. Preferably, variants will be sufficiently similar to the amino acid sequence of the peptides of the invention. Such variants generally retain the functional activity of the peptides of the present invention. Variants include peptides that differ in amino acid sequence from the native and wt peptide, respectively, by way of one or more amino acid deletion(s), addition(s), and/or substitution(s). These may be naturally occurring variants as well as artificially designed ones.

[0197] As used herein the term “linker”, “linker peptide” or “peptide linkers” or “linker” refers to synthetic or non-native or non-naturally-occurring amino acid sequences that connect or link two polypeptide sequences, e.g., that link two polypeptide domains. As used herein the term “synthetic” refers to amino acid sequences that are not naturally occurring. Exemplary linkers are described herein. Additional exemplary linkers are provided in US 20140079701, the contents of which are herein incorporated by reference in its entirety.

[0198] As used herein the term “codon-optimized” refers to the modification of codons in the gene or coding regions of a nucleic acid molecule to reflect the typical codon usage of the host organism without altering the polypeptide encoded by the nucleic acid molecule. Such optimization includes replacing at least one, or more than one, or a significant number, of codons with one or more codons that are more frequently used in the genes of the host organism. A “codon-optimized sequence” refers to a sequence, which was modified from an existing coding sequence, or designed, for example, to improve translation in an expression host cell or organism of a transcript RNA molecule transcribed from the coding sequence, or to improve transcription of a coding sequence. Codon optimization includes, but is not limited to, processes including selecting codons for the coding sequence to suit the codon preference of the expression host organism. Many organisms display a bias or preference for use of particular codons to code for insertion of a particular amino acid in a growing polypeptide chain. Codon preference or codon bias, differences in codon usage between organisms, is allowed by the degeneracy of the genetic code, and is well documented among many organisms. Codon bias often correlates with the efficiency of translation of messenger RNA (mRNA), which is in turn believed to be dependent on, inter alia, the properties of the codons being translated and the availability of particular transfer RNA (tRNA) molecules. The predominance of selected tRNAs in a cell is generally a reflection of the codons used most frequently in peptide synthesis. Accordingly, genes can be tailored for optimal gene expression in a given organism based on codon optimization.

[0199] As used herein, the terms “secretion system” or “secretion protein” refers to a native or non-native secretion mechanism capable of secreting or exporting a biomolecule, e.g., polypeptide from the microbial, e.g., bacterial cytoplasm. The secretion system may comprise a single protein or may comprise two or more proteins assembled in a complex e.g., HlyBD. Non-limiting examples of secretion systems for gram negative bacteria include the modified type III flagellar, type I (e.g., hemolysin secretion system), type II, type IV, type V, type VI, and type VII secretion systems, resistance-nodulation-division (RND) multi-drug efflux pumps, various single membrane secretion systems. Non-limiting examples of secretion systems for gram positive bacteria include Sec and TAT secretion systems. In some embodiments, the polypeptide to be secreted include a “secretion tag” of either RNA or peptide origin to direct the polypeptide to specific secretion systems. In some embodiments, the secretion system is able to remove this tag before secreting the polypeptide from the engineered bacteria. For example, in Type V auto-secretion-mediated secretion the N-terminal peptide secretion tag is removed upon translocation of the “passenger” peptide from the cytoplasm into the periplasmic compartment by the native Sec system. Further, once the auto-secretor is translocated across the outer membrane the C-terminal secretion tag can be removed by either an autocatalytic or protease-catalyzed e.g., OmpT cleavage thereby releasing the antiinflammatory or barrier enhancer molecule(s) into the extracellular milieu. In some embodiments, the secretion system involves the generation of a “leaky” or de-stabilized outer membrane, which may be accomplished by deleting or mutagenizing genes responsible for tethering the outer membrane to the rigid peptidoglycan skeleton, including for example, lpp, ompC, ompA, ompF, tolA, tolB, pal, degS, degP, and nipl. Lpp functions as the primary ‘staple’ of the bacterial cell wall to the peptidoglycan. TolA-PAL and OmpA complexes function similarly to Lpp and are other deletion targets to generate a leaky phenotype. Additionally, leaky phenotypes have been observed when periplasmic proteases, such as degS, degP or nlpl, are deactivated. Thus, in some embodiments, the engineered bacteria have one or more deleted or mutated membrane genes, e.g., selected from lpp, ompA, ompA, ompF, tolA, tolB, and pal genes. In some embodiments, the engineered bacteria have one or more deleted or mutated periplasmic protease genes, e.g., selected from degS, degP, and nlpl. In some embodiments, the engineered bacteria have one or more deleted or mutated gene(s), selected from lpp, ompA, ompA, ompF, tolA, tolB, pal, degS, degP, and nlpl genes.

[0200] The articles “a” and “an,” as used herein, should be understood to mean “at least one,” unless clearly indicated to the contrary.

[0201] The phrase “and/or,” when used between elements in a list, is intended to mean either (1) that only a single listed element is present, or (2) that more than one element of the list is present. For example, “A, B, and/or C” indicates that the selection may be A alone; B alone; C alone; A and B; A and C; B and C; or A, B, and C. The phrase “and/or” may be used interchangeably with “at least one of” or “one or more of” the elements in a list.

[0202] Ranges provided herein are understood to be shorthand for all of the values within the range. For example, a range of 1 to 50 is understood to include any number, combination of numbers, or sub-range from the group consisting 1, 2, 3, 4, 5, 6, 7, 8, 9, 10, 11, 12, 13, 14, 15, 16, 17, 18, 19, 20, 21, 22, 23, 24, 25, 26, 27, 28, 29, 30, 31, 32, 33, 34, 35, 36, 37, 38, 39, 40, 41, 42, 43, 44, 45, 46, 47, 48, 49, or 50.

[0203] Bacteria

[0204] The genetically engineered microorganisms, or programmed microorganisms, such as genetically engineered bacteria of the disclosure are capable of producing one or more non-native anti-inflammation and/or gut barrier function enhancer molecules. In certain embodiments, the genetically engineered bacteria are obligate anaerobic bacteria. In certain embodiments, the genetically engineered bacteria are facultative anaerobic bacteria. In certain embodiments, the genetically engineered bacteria are aerobic bacteria. In some embodiments, the genetically engineered bacteria are Gram-positive bacteria. In some embodiments, the genetically engineered bacteria are Gram-positive bacteria and lack LPS. In some embodiments, the genetically engineered bacteria are Gram-negative bacteria. In some embodiments, the genetically engineered bacteria are Gram-positive and obligate anaerobic bacteria. In some embodiments, the genetically engineered bacteria are Gram-positive and facultative anaerobic bacteria. In some embodiments, the genetically engineered bacteria are non-pathogenic bacteria. In some embodiments, the genetically engineered bacteria are commensal bacteria. In some embodiments, the genetically engineered bacteria are probiotic bacteria. In some embodiments, the genetically engineered bacteria are naturally pathogenic bacteria that are modified or mutated to reduce or eliminate pathogenicity. Exemplary bacteria include, but are not limited to, Bacillus, Bacteroides, Bifidobacterium, Brevibacteria, Caulobacter, Clostridium, Enterococcus, Escherichia coli, Lactobacillus, Lactococcus, Listeria, Mycobacterium, Saccharomyces, Salmonella, Staphylococcus, Streptococcus, Vibrio, Bacillus coagulans, Bacillus subtilis, Bacteroides fragilis, Bacteroides subtilis, Bacteroides thetaiotaomicron, Bifidobacterium adolescentis, Bifidobacterium bifidum, Bifidobacterium breve UCC2003, Bifidobacterium infantis, Bifidobacterium lactis, Bifidobacterium longum, Clostridium acetobutylicum, Clostridium butyricum, Clostridium butyricum M-55, Clostridium cochlearum, Clostridium felsineum, Clostridium histolyticum, Clostridium multifermentans, Clostridium novyi-NT, Clostridium paraputrificum, Clostridium pasteureanum, Clostridium pectinovorum, Clostridium perfringens, Clostridium roseum, Clostridium sporogenes, Clostridium tertium, Clostridium tetani, Clostridium tyrobutyricum, Corynebacterium parvum, Escherichia coli MG 1655, Escherichia coli Nissle 1917, Listeria monocytogenes, Mycobacterium bovis, Salmonella choleraesuis, Salmonella typhimurium, and Vibrio cholera. In certain embodiments, the genetically engineered bacteria are selected from the group consisting of Enterococcus faecium, Lactobacillus acidophilus, Lactobacillus bulgaricus, Lactobacillus casei, Lactobacillus johnsonii, Lactobacillus paracasei, Lactobacillus plantarum, Lactobacillus reuteri, Lactobacillus rhamnosus, Lactococcus lactis, and Saccharomyces boulardii, Clostridium clusters IV and XIVa of Firmicutes (including species of Eubacterium), Roseburia, Faecalibacterium, Enterobacter, Faecalibacterium prausnitzii, Clostridium difficile, Subdoligranulum, Clostridium sporogenes, Campylobacter jejuni, Clostridium saccharolyticum, Klebsiella, Citrobacter, Pseudobutyrivibrio, and Ruminococcus. In certain embodiments, the the genetically engineered bacteria are selected from Bacteroides fragilis, Bacteroides thetaiotaomicron, Bacteroides subtilis, Bifidobacterium bifidum, Bifidobacterium infantis, Bifidobacterium lactis, Clostridium butyricum, Escherichia coli, Escherichia coli Nissle, Lactobacillus acidophilus, Lactobacillus plantarum, Lactobacillus reuteri, and Lactococcus lactis

[0205] In some embodiments, the genetically engineered bacterium is a Gram-positive bacterium, e.g., Clostridium, that is naturally capable of producing high levels of butyrate. In some embodiments, the genetically engineered bacterium is selected from the group consisting of C. butyricum ZJUCB, C. butyricum S21, C. thermobutyricum ATCC 49875, C. beijerinckii, C. populeti ATCC 35295, C. tyrobutyricum JM1, C. tyrobutyricum CIP 1-776, C. tyrobutyricum ATCC 25755, C. tyrobutyricum CNRZ 596, and C. tyrobutyricum ZJU 8235. In some embodiments, the genetically engineered bacterium is C. butyricum CBM588, a probiotic bacterium that is highly amenable to protein secretion and has demonstrated efficacy in treating IBD (Kanai et al., 2015). In some embodiments, the genetically engineered bacterium is Bacillus, a probiotic bacterium that is highly genetically tractable and has been a popular chassis for industrial protein production; in some embodiments, the bacterium has highly active secretion and/or no toxic byproducts (Cutting, 2011).

[0206] In one embodiment, the bacterial cell is a Bacteroides fragilis bacterial cell. In one embodiment, the bacterial cell is a Bacteroides thetaiotaomicron bacterial cell. In one embodiment, the bacterial cell is a Bacteroides subtilis bacterial cell. In one embodiment, the bacterial cell is a Bifidobacterium bifidum bacterial cell. In one embodiment, the bacterial cell is a Bifidobacterium infantis bacterial cell. In one embodiment, the bacterial cell is a Bifidobacterium lactis bacterial cell. In one embodiment, the bacterial cell is a Clostridium butyricum bacterial cell. In one embodiment, the bacterial cell is an Escherichia coli bacterial cell. In one embodiment, the bacterial cell is a Lactobacillus acidophilus bacterial cell. In one embodiment, the bacterial cell is a Lactobacillus plantarum bacterial cell. In one embodiment, the bacterial cell is a Lactobacillus reuteri bacterial cell. In one embodiment, the bacterial cell is a Lactococcus lactis bacterial cell.

[0207] In some embodiments, the genetically engineered bacteria are Escherichia coli strain Nissle 1917 (E. coli Nissle), a Gram-negative bacterium of the Enterobacteriaceae family that has evolved into one of the best characterized probiotics (Ukena et al., 2007). The strain is characterized by its complete harmlessness (Schultz, 2008), and has GRAS (generally recognized as safe) status (Reister et al., 2014, emphasis added). Genomic sequencing confirmed that E. coli Nissle lacks prominent virulence factors (e.g., E. coli α-hemolysin, P-fimbrial adhesins) (Schultz, 2008). In addition, it has been shown that E. coli Nissle does not carry pathogenic adhesion factors, does not produce any enterotoxins or cytotoxins, is not invasive, and not uropathogenic (Sonnenborn et al., 2009). As early as in 1917, E. coli Nissle was packaged into medicinal capsules, called Mutaflor, for therapeutic use. E. coli Nissle has since been used to treat ulcerative colitis in humans in vivo (Rembacken et al., 1999), to treat inflammatory bowel disease, Crohn's disease, and pouchitis in humans in vivo (Schultz, 2008), and to inhibit enteroinvasive Salmonella, Legionella, Yersinia, and Shigella in vitro (Altenhoefer et al., 2004). It is commonly accepted that E. coli Nissle's therapeutic efficacy and safety have convincingly been proven (Ukena et al., 2007). In some embodiments, the genetically engineered bacteria are E. coli Nissle and are naturally capable of promoting tight junctions and gut barrier function. In some embodiments, the genetically engineered bacteria are E. coli and are highly amenable to recombinant protein technologies.

[0208] One of ordinary skill in the art would appreciate that the genetic modifications disclosed herein may be adapted for other species, strains, and subtypes of bacteria. It is known, for example, that the clostridial butyrogenic pathway genes are widespread in the genome-sequenced clostridia and related species (Aboulnaga et al., 2013). Furthermore, genes from one or more different species of bacteria can be introduced into one another, e.g., the butyrogenic genes from Peptoclostridium difficile have been expressed in Escherichia coli (Aboulnaga et al., 2013).

[0209] In one embodiment, the recombinant bacterial cell does not colonize the subject having the disorder. Unmodified E. coli Nissle and the genetically engineered bacteria of the invention may be destroyed, e.g., by defense factors in the gut or blood serum (Sonnenborn et al., 2009) or by activation of a kill switch, several hours or days after administration. Thus, the genetically engineered bacteria may require continued administration. Residence time in vivo may be calculated for the genetically engineered bacteria. In some embodiments, the residence time is calculated for a human subject. In some embodiments, residence time in vivo is calculated for the genetically engineered bacteria of the invention, e.g. as described herein.

[0210] In some embodiments, the bacterial cell is a genetically engineered bacterial cell. In another embodiment, the bacterial cell is a recombinant bacterial cell. In some embodiments, the disclosure comprises a colony of bacterial cells disclosed herein.

[0211] In another aspect, the disclosure provides a recombinant bacterial culture which comprises bacterial cells disclosed herein.

[0212] In some embodiments, the genetically engineered bacteria comprising an anti-inflammatory or gut barrier enhancer molecule further comprise a kill-switch circuit, such as any of the kill-switch circuits provided herein. For example, in some embodiments, the genetically engineered bacteria further comprise one or more genes encoding one or more recombinase(s) under the control of an inducible promoter, and an inverted toxin sequence. In some embodiments, the genetically engineered bacteria further comprise one or more genes encoding an antitoxin. In some embodiments, the engineered bacteria further comprise one or more genes encoding one or more recombinase(s) under the control of an inducible promoter and one or more inverted excision genes, wherein the excision gene(s) encode an enzyme that deletes an essential gene. In some embodiments, the genetically engineered bacteria further comprise one or more genes encoding an antitoxin. In some embodiments, the engineered bacteria further comprise one or more genes encoding a toxin under the control of a promoter having a TetR repressor binding site and a gene encoding the TetR under the control of an inducible promoter that is induced by arabinose, such as ParaBAD. In some embodiments, the genetically engineered bacteria further comprise one or more genes encoding an antitoxin.

[0213] In some embodiments, the genetically engineered bacteria is an auxotroph comprising gene sequence encoding an anti-inflammatory or gut barrier enhancer molecule and further comprises a kill-switch circuit, such as any of the kill-switch circuits described herein.

[0214] In some embodiments of the above described genetically engineered bacteria, the gene encoding an anti-inflammatory or gut barrier enhancer molecule is present on a plasmid in the bacterium. In some embodiments, the gene sequence(s) encoding an anti-inflammatory or gut barrier enhancer molecule is present in the bacterial chromosome. In some embodiments, a gene sequence encoding a secretion protein or protein complex, such as any of the secretion systems disclosed herein, for secreting a biomolecule (e.g. an anti-inflammatory or gut barrier enhancer molecule), is present on a plasmid in the bacterium. In some embodiments, the gene sequence encoding a secretion protein or protein complex for secreting a biomolecule, such as any of the secretion systems disclosed herein, is present in the bacterial chromosome. In some embodiments, the gene sequence(s) encoding an antibiotic resistance gene is present on a plasmid in the bacterium. In some embodiments, the gene sequence(s) encoding an antibiotic resistance gene is present in the bacterial chromosome.

[0215] Anti-Inflammation and/or Gut Barrier Function Enhancer Molecules

[0216] The genetically engineered bacteria comprise one or more gene sequence(s) and/or gene cassette(s) for producing a non-native anti-inflammation and/or gut barrier function enhancer molecule. In some embodiments, the genetically engineered bacteria comprise one or more gene sequence(s) for producing a non-native anti-inflammation and/or gut barrier function enhancer molecule. For example, the genetically engineered bacteria may comprise two or more gene sequence(s) for producing a non-native anti-inflammation and/or gut barrier function enhancer molecule. In some embodiments, the two or more gene sequences are multiple copies of the same gene. In some embodiments, the two or more gene sequences are sequences encoding different genes. In some embodiments, the two or more gene sequences are sequences encoding multiple copies of one or more different genes. In some embodiments, the genetically engineered bacteria comprise one or more gene cassette(s) for producing a non-native anti-inflammation and/or gut barrier function enhancer molecule. For example, the genetically engineered bacteria may comprise two or more gene cassette(s) for producing a non-native anti-inflammation and/or gut barrier function enhancer molecule. In some embodiments, the two or more gene cassettes are multiple copies of the same gene cassette. In some embodiments, the two or more gene cassettes are different gene cassettes for producing either the same or different anti-inflammation and/or gut barrier function enhancer molecule(s). In some embodiments, the two or more gene cassettes are gene cassettes for producing multiple copies of one or more different anti-inflammation and/or gut barrier function enhancer molecule(s). In some embodiments, the anti-inflammation and/or gut barrier function enhancer molecule is selected from the group consisting of a short-chain fatty acid, butyrate, propionate, acetate, IL-2, IL-22, superoxide dismutase (SOD), GLP-2, GLP-1, IL-10 (human or viral), IL-27, TGF-β1, TGF-β2, N-acylphosphatidylethanolamines (NAPEs), elafin (also known as peptidase inhibitor 3 or SKALP), trefoil factor, melatonin, PGD2, kynurenic acid, kynurenine, typtophan metabolite, indole, indole metabolite, a single-chain variable fragment (scFv), antisense RNA, siRNA, or shRNA that neutralizes TNF-α, IFN-γ, IL-1β, IL-6, IL-8, IL-17, and/or chemokines, e.g., CXCL-8 and CCL2, AHR agonist (e.g., indole acetic acid, indole-3-aldehyde, and indole), PXR agonist (e.g., IPA), HDAC inhibitor (e.g., butyrate), GPR41 and/or GPR43 activator (e.g., butyrate and/or propionate and/or acetate), GPR109A activator (e.g., butyrate), inhibitor of NF-kappaB signaling (e.g., butyrate), modulator of PPARgamma (e.g., butyrate), activator of AMPK signaling (e.g., acetate), modulator of GLP-1 secretion, and hydroxyl radical scavengers and antioxidants (e.g., IPA). A molecule may be primarily anti-inflammatory, e.g., IL-10, or primarily gut barrier function enhancing, e.g., GLP-2. Alternatively, a molecule may be both anti-inflammatory and gut barrier function enhancing.

[0217] In some embodiments, the genetically engineered bacteria of the invention express one or more anti-inflammation and/or gut barrier function enhancer molecule(s) that is encoded by a single gene, e.g., the molecule is elafin and encoded by the PI3 gene, or the molecule is interleukin-10 and encoded by the IL10 gene. In alternate embodiments, the genetically engineered bacteria of the invention encode one or more an anti-inflammation and/or gut barrier function enhancer molecule(s), e.g., butyrate, that is synthesized by a biosynthetic pathway requiring multiple genes.

[0218] The one or more gene sequence(s) and/or gene cassette(s) may be expressed on a high-copy plasmid, a low-copy plasmid, or a chromosome. In some embodiments, expression from the plasmid may be useful for increasing expression of the anti-inflammation and/or gut barrier function enhancer molecule(s). In some embodiments, expression from the chromosome may be useful for increasing stability of expression of the anti-inflammation and/or gut barrier function enhancer molecule(s). In some embodiments, the gene sequence(s) or gene cassette(s) for producing the anti-inflammation and/or gut barrier function enhancer molecule(s) is integrated into the bacterial chromosome at one or more integration sites in the genetically engineered bacteria. For example, one or more copies of the butyrate biosynthesis gene cassette may be integrated into the bacterial chromosome. In some embodiments, the gene sequence(s) or gene cassette(s) for producing the anti-inflammation and/or gut barrier function enhancer molecule(s) is expressed from a plasmid in the genetically engineered bacteria. In some embodiments, the gene sequence(s) or gene cassette(s) for producing the anti-inflammation and/or gut barrier function enhancer molecule(s) is inserted into the bacterial genome at one or more of the following insertion sites in E. coli Nissle: malE/K, araC/BAD, lacZ, thyA, malP/T. Any suitable insertion site may be used (see, e.g., FIG. 52 for exemplary insertion sites). The insertion site may be anywhere in the genome, e.g., in a gene required for survival and/or growth, such as thyA (to create an auxotroph); in an active area of the genome, such as near the site of genome replication; and/or in between divergent promoters in order to reduce the risk of unintended transcription, such as between AraB and AraC of the arabinose operon.

[0219] Short Chain Fatty Acids and Tryptophan Metabolites

[0220] One strategy in the treatment, prevention, and/or management of inflammatory bowel disorders may include approaches to help maintain and/or reestablish gut barrier function, e.g. through the prevention, treatment and/or management of inflammatory events at the root of increased permeability, e.g. through the administration of anti-inflammatory effectors.

[0221] For example, leading metabolites that play gut-protective roles are short chain fatty acids, e.g. acetate, butyrate and propionate, and those derived from tryptophan metabolism. These metabolites have been shown to play a major role in the prevention of inflammatory disease. As such one approach in the treatment, prevention, and/or management of gut barrier health may be to provide a treatment which contains one or more of such metabolites.

[0222] For example, butyrate and other SCFA, e.g., derived from the microbiota, are known to promote maintaining intestinal integrity (e.g., as reviewed in Thorburn et al., Diet, Metabolites, and “Western-Lifestyle” Inflammatory Diseases; Immunity Volume 40, Issue 6, 19 Jun. 2014, Pages 833-842). (A) SCFA-induced promotion of mucus by gut epithelial cells, possibly through signaling through metabolite sensing GPCRs; (B) SCFA-induced secretion of IgA by B cells; (C) SCFA-induced promotion of tissue repair and wound healing; (D) SCFA-induced promotion of Treg cell development in the gut in a process that presumably facilitates immunological tolerance; (E) SCFA-mediated enhancement of epithelial integrity in a process dependent on inflammasome activation (e.g., via NALP3) and IL-18 production; and (F) anti-inflammatory effects, inhibition of inflammatory cytokine production (e.g., TNF, 11-6, and IFN-gamma), and inhibition of NF-κB. Many of these actions of SCFAs in gut homeostatis can be ascribed to GPR43 and GPR109A, which are expressed by the colonic epithelium, by inflammatory leukocytes (e.g. neutrophils and macrophages) and by Treg cells. These receptors signal through G proteins, coupled to MAPK, PI3K and mTOR, as well as a separate arrestin-pathway, leading to NFkappa B inhibition. Other effects can be ascribed to SCFA-mediated HDAC inhibition, e.g. butyrate, which may regulate macrophage function and promote TReg cells.

[0223] In addition, a number of tryptophan metabolites, including kynurenine and kynurenic acid, as well as several indoles, such as indole-3 aldehyde, indole-3 propionic acid, and several other indole metabolites (which can be derived from microbiota or the diet) described infra, have been shown to be essential for gut homeostasis and promote gut-barrier health. These metabolites bind to aryl hydrocarbon receptor (Ahr). After agonist binding, AhR translocates to the nucleus, where it forms a heterodimer with AhR nuclear translocator (ARNT). AhR-dependent gene expression includes genes involved in the production of mediators important for gut homeostasis; these mediators include IL-22, antimicrobicidal factors, increased Th17 cell activity, and the maintenance of intraepithelial lymphocytes and RORγt+ innate lymphoid cells.

[0224] Tryptophan can also be transported across the epithelium by transport machinery comprising angiotensin I converting enzyme 2 (Ace2). Tryptophan is degraded to kynurenine, another AhR agonist, by the immune-regulatory enzyme indoleamine 2,3-dioxygenase (IDO), which is linked to suppression of T cell responses, promotion of Treg cells, and immune tolerance. Moreover, a number of tryptophan metabolites, including kynurenic acid and niacin, agonize metabolite-sensing GPCRs, such as GPR35 and GPR109A and thus multiple elements of tryptophan catabolism facilitate gut homeostasis.

[0225] In addition, some indole metabolites, e.g., indole 3-propionic acid (IPA), may exert their effect an activating ligand of Pregnane X receptor (PXR), which is thought to play a key role as an essential regulator of intestinal barrier function, through downregulation of TLR4 signaling (Venkatesh et al., 2014 Symbiotic Bacterial Metabolites Regulate Gastrointestinal Barrier Function via the Xenobiotic Sensor PXR and Toll-like Receptor 4; Immunity 41, 296-310, Aug. 21, 2014). As a result, indole levels may through the activation of PXR regulate and balance the levels of TLR4 expression to promote homeostasis and gut barrier health.

[0226] Thus, in some embodiments, the genetically engineered bacteria of the disclosure produce one or more short chain fatty acids and/or one or more tryptophan metabolites.

[0227] Acetate

[0228] In some embodiments, the genetically engineered bacteria of the invention comprise an acetate gene cassette and are capable of producing acetate. The genetically engineered bacteria may include any suitable set of acetate biosynthesis genes. In other embodiments, the bacteria comprise an endogenous acetate biosynthetic gene or gene cassette and naturally produce acetate. Unmodified bacteria comprising acetate biosynthesis genes are known in the art and are capable of consuming various substrates to produce acetate under aerobic and/or anaerobic conditions (see, e.g., Ragsdale, 2008), and these endogenous acetate biosynthesis pathways may be a source of genes for the genetically engineered bacteria of the invention. In some embodiments, the genetically engineered bacteria of the invention comprise acetate biosynthesis genes from a different species, strain, or substrain of bacteria. In some embodiments, the native acetate biosynthesis genes in the genetically engineered bacteria are enhanced. In some embodiments, the genetically engineered bacteria comprise aerobic acetate biosynthesis genes, e.g., from Escherichia coli. In some embodiments, the genetically engineered bacteria comprise anaerobic acetate biosynthesis genes, e.g., from Acetitomaculum, Acetoanaerobium, Acetohalobium, Acetonema, Balutia, Butyribacterium, Clostridium, Moorella, Oxobacter, Sporomusa, and/or Thermoacetogenium. The genetically engineered bacteria may comprise genes for aerobic acetate biosynthesis or genes for anaerobic or microaerobic acetate biosynthesis. In some embodiments, the genetically engineered bacteria comprise both aerobic and anaerobic or microaerobic acetate biosynthesis genes. In some embodiments, the genetically engineered bacteria comprise a combination of acetate biosynthesis genes from different species, strains, and/or substrains of bacteria, and are capable of producing acetate. In some embodiments, one or more of the acetate biosynthesis genes is functionally replaced, modified, and/or mutated in order to enhance stability and/or acetate production. In some embodiments, the genetically engineered bacteria are capable of expressing the acetate biosynthesis cassette and producing acetate under inducing conditions. In some embodiments, the genetically engineered bacteria are capable of producing an alternate short-chain fatty acid.

[0229] In E. coli Nissle, acetate is generated as an end product of fermentation. In E. coli, glucose fermentation occurs in two steps, (1) the glycolysis reactions and (2) the NADH recycling reactions, i.e. these reactions re-oxidize the NAD+ generated during the fermentation process. E. coli employs the “mixed acid” fermentation pathway (see, e.g., FIG. 25). Through the “mixed acid” pathway, E. coli generates several alternative end products and in variable amounts (e.g., lactate, acetate, formate, succinate, ethanol, carbon dioxide, and hydrogen) though various arms of the fermentation pathway, e.g., as shown in FIG. 25. Without wishing to be bound by theory, prevention or reduction of flux through one or more metabolic arm(s) generating metabolites other than acetate, e.g. through mutation, deletion and/or inhibition of one or more gene(s) encoding key enzymes in these metabolic arms, results in an increase in production of acetate for NAD recycling. As disclosed herein, e.g., in Example 20, deletions in gene(s) encoding such enzymes increase acetate production. Such enzymes include fumarate reductase (encoded by the frd genes), lactate dehydrogenase (encoded by the ldh gene), and aldehyde-alcohol dehydrogenase (encoded by the adhE gene).

[0230] LdhA is a soluble NAD-linked lactate dehydrogenase (LDH) that is specific for the production of D-lactate and is a homotetramer and shows positive homotropic cooperativity under higher pH conditions. E. coli carrying ldhA mutations show no observable growth defect and can still ferment sugars to a variety of products other than lactate.

[0231] In some embodiments, the genetically engineered bacteria producing acetate comprise a mutation and/or deletion in the endogenous ldhA gene.

[0232] AdhE is a homopolymeric protein with three catalytic functions: alcohol dehydrogenase, coenzyme A-dependent acetaldehyde dehydrogenase, and pyruvate formate-lyase deactivase. During fermentation, AdhE has catalyzes two steps towards the generation of ethanol: (1) the reduction of acetyl-CoA to acetaldehyde and (2) the reduction of acetaldehyde to to ethanol. Deletion of adhE has been employed to enhance production of certain metabolites industrially, including succinate, D-lactate, and polyhydroxyalkanoates (Singh et al, Manipulating redox and ATP balancing for improved production of succinate in E. coli.; Metab Eng. 2011 January; 13(1):76-81; Zhou et al., Evaluation of genetic manipulation strategies on D-lactate production by Escherichia coli, Curr Microbiol. 2011 March; 62(3):981-9; Jian et al., Production of polyhydroxyalkanoates by Escherichia coli mutants with defected mixed acid fermentation pathways, Appl Microbiol Biotechnol. 2010 August; 87(6):2247-56).

[0233] In some embodiments, the genetically engineered bacteria producing acetate comprise a mutation and/or deletion in the endogenous adhE gene.

[0234] The fumarate reductase enzyme complex, encoded by the frdABCD operon, allows Escherichia coli to utilize fumarate as a terminal electron acceptor for anaerobic oxidative phosphorylation. FrdA is one of two catalytic subunits in the four subunit fumarate reductase complex. FrdB is the second catalytic subunit of the complex. FrdC and FrdD are two integral membrane protein components of the fumarate reductase complex. In some embodiments, the genetically engineered bacteria comprise a mutation and/or deletion in the endogenous frdA gene.

[0235] In some embodiments, the genetically engineered bacteria producing acetate comprise a mutation and/or deletion in one or more endogenous genes selected from in the ldhA gene, the frdA gene and the adhE gene. In some embodiments, the genetically engineered bacteria comprise a mutation and/or deletion in the endogenous ldhA and rdA genes. In some embodiments, the genetically engineered bacteria comprise a mutation and/or deletion in the endogenous ldhA genes and adhE genes. In some embodiments, the genetically engineered bacteria comprise a mutation and/or deletion in the endogenous frdA and adhE genes. In some embodiments, the genetically engineered bacteria comprise a mutation and/or deletion in the endogenous ldhA, the frdA, and adhE genes.

[0236] In some embodiments, the genetically engineered bacteria produce 0% to to 2% to 4%, 4% to 6%, 6% to 8%, 8% to 10%, 10% to 12%, 12% to 14%, 14% to 16%, 16% to 18%, 18% to 20%, 20% to 25%, 25% to 30%, 30% to 35%, 35% to 40%, 40% to 45% 45% to 50%, 50% to 55%, 55% to 60%, 60% to 65%, 65% to 70% to 80%, 80% to 90%, or 90% to 100% more acetate than unmodified bacteria of the same bacterial subtype under the same conditions. In yet another embodiment, the genetically engineered bacteria produce 1.0-1.2-fold, 1.2-1.4-fold, 1.4-1.6-fold, 1.6-1.8-fold, 1.8-2-fold, or two-fold more acetate than unmodified bacteria of the same bacterial subtype under the same conditions. In yet another embodiment, the the genetically engineered bacteria produce three-fold, four-fold, five-fold, six-fold, seven-fold, eight-fold, nine-fold, ten-fold, fifteen-fold, twenty-fold, thirty-fold, forty-fold, or fifty-fold, more acetate than unmodified bacteria of the same bacterial subtype under the same conditions.

[0237] In certain situations, the need may arise to prevent and/or reduce acetate production by of an engineered or naturally occurring strain, e.g., E. coli Nissle. Without wishing to be bound by theory, one or more mutations and/or deletions in one or more gene(s) encoding one or more enzyme(s) which function in the acetate producing metabolic arm of fermentation should reduce and/or prevent production of acetate.

[0238] Phosphate acetyltransferase (Pta) catalyzes the reversible conversion between acetyl-CoA and acetylphosphate, a step in the metabolism of acetate (Campos-Bermudez et al., Functional dissection of Escherichia coli phosphotransacetylase structural domains and analysis of key compounds involved in activity regulation; FEBS J. 2010 April; 277(8):1957-66). Both pyruvate and phosphoenolpyruvate activate the enzyme in the direction of acetylphosphate synthesis and inhibit the enzyme in the direction of acetyl-CoA synthesis. The acetate formation from acetyl-CoA I pathway has been the target of metabolic engineering to reduce the flux to acetate and increase the production of commercially desired end products (see, e.g., Singh, et al., Manipulating redox and ATP balancing for improved production of succinate in E. coli; Metab Eng. 2011 January; 13(1):76-81). A pta mutant does not grow on acetate as the sole source of carbon (Brown et al., The enzymic interconversion of acetate and acetyl-coenzyme A in Escherichia coli; J Gen Microbiol. 1977 October; 102(2):327-36).

[0239] In some embodiments, the genetically engineered bacteria comprise a mutation and/or deletion in the endogenous pta gene. In some embodiments, the genetically engineered bacteria produce butyrate. In some embodiments, the genetically engineered bacteria comprise a mutation and/or deletion in the endogenous pta gene and also in one or more endogenous genes selected from the ldhA gene, the frdA gene and the adhE gene. In some embodiments, the genetically engineered bacteria comprise a mutation and/or deletion in the endogenous pta and adhE genes. In some embodiments, the genetically engineered bacteria comprise a mutation and/or deletion in the endogenous pta and ldhA genes. In some embodiments, the genetically engineered bacteria comprise a mutation and/or deletion in the endogenous pta and frdA genes. In some embodiments, the genetically engineered bacteria comprise a mutation and/or deletion in the endogenous pta, ldhA and frdA genes. In some embodiments, the genetically engineered bacteria comprise a mutation and/or deletion in the endogenous pta, ldhA, and adhE genes. In some embodiments, the genetically engineered bacteria comprise a mutation and/or deletion in the endogenous pta, frdA and adhE genes. In some embodiments, the genetically engineered bacteria comprise a mutation and/or deletion in the endogenous pta, ldhA, frdA, and adhE genes. In some embodiments, the genetically engineered bacterias produce butyrate.

[0240] In some embodiments, the genetically engineered bacteria produce 0% to to 2% to 4%, 4% to 6%, 6% to 8%, 8% to 10%, 10% to 12%, 12% to 14%, 14% to 16%, 16% to 18%, 18% to 20%, 20% to 25%, 25% to 30%, 30% to 35%, 35% to 40%, 40% to 45% 45% to 50%, 50% to 55%, 55% to 60%, 60% to 65%, 65% to 70% to 80%, 80% to 90%, or 90% to 100% less acetate than unmodified bacteria of the same bacterial subtype under the same conditions. In yet another embodiment, the genetically engineered bacteria produce 1.0-1.2-fold, 1.2-1.4-fold, 1.4-1.6-fold, 1.6-1.8-fold, 1.8-2-fold, or two-fold less acetate than unmodified bacteria of the same bacterial subtype under the same conditions. In yet another embodiment, the the genetically engineered bacteria produce three-fold, four-fold, five-fold, six-fold, seven-fold, eight-fold, nine-fold, ten-fold, fifteen-fold, twenty-fold, thirty-fold, forty-fold, or fifty-fold, less acetate than unmodified bacteria of the same bacterial subtype under the same conditions.

[0241] Butyrate

[0242] In some embodiments, the genetically engineered bacteria of the invention comprise a butyrogenic gene cassette and are capable of producing butyrate under particular exogenous environmental conditions. The genetically engineered bacteria may include any suitable set of butyrogenic genes (see, e.g., Table 2 and Table 3). Unmodified bacteria comprising butyrate biosynthesis genes are known and include, but are not limited to, Peptoclostridium, Clostridium, Fusobacterium, Butyrivibrio, Eubacterium, and Treponema. In some embodiments, the genetically engineered bacteria of the invention comprise butyrate biosynthesis genes from a different species, strain, or substrain of bacteria. In some embodiments, the genetically engineered bacteria comprise the eight genes of the butyrate biosynthesis pathway from Peptoclostridium difficile, e.g., Peptoclostridium difficile strain 630: hcd2, etfB3, etfA3, thiA1, hbd, crt2, pbt, and buk (Aboulnaga et al., 2013) and are capable of producing butyrate. Peptoclostridium difficile strain 630 and strain 1296 are both capable of producing butyrate, but comprise different nucleic acid sequences for etfA3, thiA1, hbd, crt2, pbt, and buk. In some embodiments, the genetically engineered bacteria comprise a combination of butyrogenic genes from different species, strains, and/or substrains of bacteria and are capable of producing butyrate. For example, in some embodiments, the genetically engineered bacteria comprise bcd2, etfB3, etfA3, and thiA1 from Peptoclostridium difficile strain 630, and hbd, crt2, pbt, and buk from Peptoclostridium difficile strain 1296. Alternatively, a single gene from Treponema denticola (ter, encoding trans-2-enoynl-CoA reductase) is capable of functionally replacing all three of the bcd2, etfB3, and etfA3 genes from Peptoclostridium difficile. Thus, a butyrogenic gene cassette may comprise thiA1, hbd, crt2, pbt, and buk from Peptoclostridium difficile and ter from Treponema denticola. In another example of a butyrate gene cassette, the pbt and buk genes are replaced with tesB (e.g., from E. coli). Thus a butyrogenic gene cassette may comprise ter, thiA1, hbd, crt2, and tesB.n some embodiments, the genetically engineered bacteria are capable of expressing the butyrate biosynthesis cassette and producing butyrate in low-oxygen conditions, in the presence of certain molecules or metabolites, in the presence of molecules or metabolites associated with inflammation or an inflammatory response, or in the presence of some other metabolite that may or may not be present in the gut, such as arabinose. One or more of the butyrate biosynthesis genes may be functionally replaced or modified. e.g., codon optimized.

[0243] In some embodiments, additional genes may be mutated or knocked out, to further increase the levels of butyrate production. Production under anaerobic conditions depends on endogenous NADH pools. Therefore, the flux through the butyrate pathway may be enhanced by eliminating competing routes for NADH utilization. Non-limiting examples of such competing routes are frdA (converts phosphoenolpyruvate to succinate), ldhA (converts pyruvate to lactate) and adhE (converts Acetyl-CoA to Ethanol). Thus, in certain embodiments, the genetically engineered bacteria further comprise mutations and/or deletions in one or more of frdA, ldhA, and adhE.

[0244] Table 2 depicts the nucleic acid sequences of exemplary genes in exemplary butyrate biosynthesis gene cassettes.

TABLE 2
Exemplary Butyrate Cassette Sequences

| Description | Sequence |
|---|---|
| bcd2 | ATGGATTTAAATTCTAAAAAATATCAGATGCTTAAAGAGCTATATGTAAG |
| SEQ ID NO: 1 | CTTCGCTGAAAATGAAGTTAAACCTTTAGCAACAGAACTTGATGAAGAAG |
| | AAAGATTTCCTTATGAAACAGTGGAAAAAATGGCAAAAGCAGGAATGATG |
| | GGTATACCATATCCAAAAGAATATGGTGGAGAAGGTGGAGACACTGTAGG |
| | ATATATAATGGCAGTTGAAGAATTGTCTAGAGTTTGTGGTACTACAGGAG |
| | TTATATTATCAGCTCATACATCTCTTGGCTCATGGCCTATATATCAATAT |
| | GGTAATGAAGAACAAAAACAAAAATTCTTAAGACCACTAGCAAGTGGAGA |
| | AAAATTAGGAGCATTTGGTCTTACTGAGCCTAATGCTGGTACAGATGCGT |
| | CTGGCCAACAAACAACTGCTGTTTTAGACGGGGATGAATACATACTTAAT |
| | GGCTCAAAAATATTTATAACAAACGCAATAGCTGGTGACATATATGTAGT |
| | AATGGCAATGACTGATAAATCTAAGGGGAACAAAGGAATATCAGCATTTA |
| | TAGTTGAAAAAGGAACTCCTGGGTTTAGCTTTGGAGTTAAAGAAAAGAAA |
| | ATGGGTATAAGAGGTTCAGCTACGAGTGAATTAATATTTGAGGATTGCAG |
| | AATACCTAAAGAAAATTTACTTGGAAAAGAAGGTCAAGGATTTAAGATAG |
| | CAATGTCTACTCTTGATGGTGGTAGAATTGGTATAGCTGCACAAGCTTTA |
| | GGTTTAGCACAAGGTGCTCTTGATGAAACTGTTAAATATGTAAAAGAAAG |
| | AGTACAATTTGGTAGACCATTATCAAAATTCCAAAATACACAATTCCAAT |
| | TAGCTGATATGGAAGTTAAGGTACAAGCGGCTAGACACCTTGTATATCAA |
| | GCAGCTATAAATAAAGACTTAGGAAAACCTTATGGAGTAGAAGCAGCAAT |
| | GGCAAAATTATTTGCAGCTGAAACAGCTATGGAAGTTACTACAAAAGCTG |
| | TACAACTTCATGGAGGATATGGATACACTCGTGACTATCCAGTAGAAAGA |
| | ATGATGAGAGATGCTAAGATAACTGAAATATATGAAGGAACTAGTGAAGT |
| | TCAAAGAATGGTTATTTCAGGAAAACTATTAAAATAG |
| etfB3 | ATGAATATAGTCGTTTGTATAAAACAAGTTCCAGATACAACAGAAGTTAA |
| SEQ ID NO: 2 | ACTAGATCCTAATACAGGTACTTTAATTAGAGATGGAGTACCAAGTATAA |
| | TAAACCCTGATGATAAAGCAGGTTTAGAAGAAGCTATAAAATTAAAAGAA |
| | GAAATGGGTGCTCATGTAACTGTTATAACAATGGGACCTCCTCAAGCAGA |
| | TATGGCTTTAAAAGAAGCTTTAGCAATGGGTGCAGATAGAGGTATATTAT |
| | TAACAGATAGAGCATTTGCGGGTGCTGATACTTGGGCAACTTCATCAGCA |
| | TTAGCAGGAGCATTAAAAAATATAGATTTTGATATTATAATAGCTGGAAG |
| | ACAGGCGATAGATGGAGATACTGCACAAGTTGGACCTCAAATAGCTGAAC |
| | ATTTAAATCTTCCATCAATAACATATGCTGAAGAAATAAAAACTGAAGGT |
| | GAATATGTATTAGTAAAAAGACAATTTGAAGATTGTTGCCATGACTTAAA |
| | AGTTAAAATGCCATGCCTTATAACAACTCTTAAAGATATGAACACACCAA |
| | GATACATGAAAGTTGGAAGAATATATGATGCTTTCGAAAATGATGTAGTA |
| | GAAACATGGACTGTAAAAGATATAGAAGTTGACCCTTCTAATTTAGGTCT |
| | TAAAGGTTCTCCAACTAGTGTATTTAAATCATTTACAAAATCAGTTAAAC |
| | CAGCTGGTACAATATACAATGAAGATGCGAAAACATCAGCTGGAATTATC |
| | ATAGATAAATTAAAAGAGAAGTATATCATATAA |
| etfA3 | ATGGGTAACGTTTTAGTAGTAATAGAACAAAGAGAAAATGTAATTCAAAC |
| SEQ ID NO: 3 | TGTTTCTTTAGAATTACTAGGAAAGGCTACAGAAATAGCAAAAGATTATG |
| | ATACAAAAGTTTCTGCATTACTTTTAGGTAGTAAGGTAGAAGGTTTAATA |
| | GATACATTAGCACACTATGGTGCAGATGAGGTAATAGTAGTAGATGATGA |
| | AGCTTTAGCAGTGTATACAACTGAACCATATACAAAAGCAGCTTATGAAG |
| | CAATAAAAGCAGCTGACCCTATAGTTGTATTATTTGGTGCAACTTCAATA |
| | GGTAGAGATTTAGCGCCTAGAGTTTCTGCTAGAATACATACAGGTCTTAC |
| | TGCTGACTGTACAGGTCTTGCAGTAGCTGAAGATACAAAATTATTATTAA |
| | TGACAAGACCTGCCTTTGGTGGAAATATAATGGCAACAATAGTTTGTAAA |
| | GATTTCAGACCTCAAATGTCTACAGTTAGACCAGGGGTTATGAAGAAAAA |
| | TGAACCTGATGAAACTAAAGAAGCTGTAATTAACCGTTTCAAGGTAGAAT |
| | TTAATGATGCTGATAAATTAGTTCAAGTTGTACAAGTAATAAAAGAAGCT |
| | AAAAAACAAGTTAAAATAGAAGATGCTAAGATATTAGTTTCTGCTGGACG |
| | TGGAATGGGTGGAAAAGAAAACTTAGACATACTTTATGAATTAGCTGAAA |
| | TTATAGGTGGAGAAGTTTCTGGTTCTCGTGCCACTATAGATGCAGGTTGG |
| | TTAGATAAAGCAAGACAAGTTGGTCAAACTGGTAAAACTGTAAGACCAGA |
| | CCTTTATATAGCATGTGGTATATCTGGAGCAATACAACATATAGCTGGTA |
| | TGGAAGATGCTGAGTTTATAGTTGCTATAAATAAAAATCCAGAAGCTCCA |
| | ATATTTAAATATGCTGATGTTGGTATAGTTGGAGATGTTCATAAAGTGCT |
| | TCCAGAACTTATCAGTCAGTTAAGTGTTGCAAAAGAAAAAGGTGAAGTTT |
| | TAGCTAACTAA |
| thiA1 | ATGAGAGAAGTAGTAATTGCCAGTGCAGCTAGAACAGCAGTAGGAAGTTT |
| SEQ ID NO: 4 | TGGAGGAGCATTTAAATCAGTTTCAGCGGTAGAGTTAGGGGTAACAGCAG |
| | CTAAAGAAGCTATAAAAAGAGCTAACATAACTCCAGATATGATAGATGAA |
| | TCTCTTTTAGGGGGAGTACTTACAGCAGGTCTTGGACAAAATATAGCAAG |
| | ACAAATAGCATTAGGAGCAGGAATACCAGTAGAAAAACCAGCTATGACTA |
| | TAAATATAGTTTGTGGTTCTGGATTAAGATCTGTTTCAATGGGATCTCAA |
| | CTTATAGCATTAGGTGATGCTGATATAATGTTAGTTGGTGGAGCTGAAAA |
| | CATGAGTATGTCTCCTTATTTAGTACCAAGTGCGAGATATGGTGCAAGAA |
| | TGGGTGATGCTGCTTTTGTTGATTCAATGATAAAAGATGGATTATCAGAC |
| | ATATTTAATAACTATCACATGGGTATTACTGCTGAAAACATAGCAGAGCA |
| | ATGGAATATAACTAGAGAAGAACAAGATGAATTAGCTCTTGCAAGTCAAA |
| | ATAAAGCTGAAAAAGCTCAAGCTGAAGGAAAATTTGATGAAGAAATAGTT |
| | CCTGTTGTTATAAAAGGAAGAAAAGGTGACACTGTAGTAGATAAAGATGA |
| | ATATATTAAGCCTGGCACTACAATGGAGAAACTTGCTAAGTTAAGACCTG |
| | CATTTAAAAAAGATGGAACAGTTACTGCTGGTAATGCATCAGGAATAAAT |
| | GATGGTGCTGCTATGTTAGTAGTAATGGCTAAAGAAAAAGCTGAAGAACT |
| | AGGAATAGAGCCTCTTGCAACTATAGTTTCTTATGGAACAGCTGGTGTTG |
| | ACCCTAAAATAATGGGATATGGACCAGTTCCAGCAACTAAAAAAGCTTTA |
| | GAAGCTGCTAATATGACTATTGAAGATATAGATTTAGTTGAAGCTAATGA |
| | GGCATTTGCTGCCCAATCTGTAGCTGTAATAAGAGACTTAAATATAGATA |
| | TGAATAAAGTTAATGTTAATGGTGGAGCAATAGCTATAGGACATCCAATA |
| | GGATGCTCAGGAGCAAGAATACTTACTACACTTTTATATGAAATGAAGAG |
| | AAGAGATGCTAAAACTGGTCTTGCTACACTTTGTATAGGCGGTGGAATGG |
| | GAACTACTTTAATAGTTAAGAGATAG |
| hbd | ATGAAATTAGCTGTAATAGGTAGTGGAACTATGGGAAGTGGTATTGTACA |
| SEQ ID NO: 5 | AACTTTTGCAAGTTGTGGACATGATGTATGTTTAAAGAGTAGAACTCAAG |
| | GTGCTATAGATAAATGTTTAGCTTTATTAGATAAAAATTTAACTAAGTTA |
| | GTTACTAAGGGAAAAATGGATGAAGCTACAAAAGCAGAAATATTAAGTCA |
| | TGTTAGTTCAACTACTAATTATGAAGATTTAAAAGATATGGATTTAATAA |
| | TAGAAGCATCTGTAGAAGACATGAATATAAAGAAAGATGTTTTCAAGTTA |
| | CTAGATGAATTATGTAAAGAAGATACTATCTTGGCAACAAATACTTCATC |
| | ATTATCTATAACAGAAATAGCTTCTTCTACTAAGCGCCCAGATAAAGTTA |
| | TAGGAATGCATTTCTTTAATCCAGTTCCTATGATGAAATTAGTTGAAGTT |
| | ATAAGTGGTCAGTTAACATCAAAAGTTACTTTTGATACAGTATTTGAATT |
| | ATCTAAGAGTATCAATAAAGTACCAGTAGATGTATCTGAATCTCCTGGAT |
| | TTGTAGTAAATAGAATACTTATACCTATGATAAATGAAGCTGTTGGTATA |
| | TATGCAGATGGTGTTGCAAGTAAAGAAGAAATAGATGAAGCTATGAAATT |
| | AGGAGCAAACCATCCAATGGGACCACTAGCATTAGGTGATTTAATCGGAT |
| | TAGATGTTGTTTTAGCTATAATGAACGTTTTATATACTGAATTTGGAGAT |
| | ACTAAATATAGACCTCATCCACTTTTAGCTAAAATGGTTAGAGCTAATCA |
| | ATTAGGAAGAAAAACTAAGATAGGATTCTATGATTATAATAAATAA |
| crt2 | ATGAGTACAAGTGATGTTAAAGTTTATGAGAATGTAGCTGTTGAAGTAGA |
| SEQ ID NO: 6 | TGGAAATATATGTACAGTGAAAATGAATAGACCTAAAGCCCTTAATGCAA |
| | TAAATTCAAAGACTTTAGAAGAACTTTATGAAGTATTTGTAGATATTAAT |
| | AATGATGAAACTATTGATGTTGTAATATTGACAGGGGAAGGAAAGGCATT |
| | TGTAGCTGGAGCAGATATTGCATACATGAAAGATTTAGATGCTGTAGCTG |
| | CTAAAGATTTTAGTATCTTAGGAGCAAAAGCTTTTGGAGAAATAGAAAAT |
| | AGTAAAAAAGTAGTGATAGCTGCTGTAAACGGATTTGCTTTAGGTGGAGG |
| | ATGTGAACTTGCAATGGCATGTGATATAAGAATTGCATCTGCTAAAGCTA |
| | AATTTGGTCAGCCAGAAGTAACTCTTGGAATAACTCCAGGATATGGAGGA |
| | ACTCAAAGGCTTACAAGATTGGTTGGAATGGCAAAAGCAAAAGAATTAAT |
| | CTTTACAGGTCAAGTTATAAAAGCTGATGAAGCTGAAAAAATAGGGCTAG |
| | TAAATAGAGTCGTTGAGCCAGACATTTTAATAGAAGAAGTTGAGAAATTA |
| | GCTAAGATAATAGCTAAAAATGCTCAGCTTGCAGTTAGATACTCTAAAGA |
| | AGCAATACAACTTGGTGCTCAAACTGATATAAATACTGGAATAGATATAG |
| | AATCTAATTTATTTGGTCTTTGTTTTTCAACTAAAGACCAAAAAGAAGGA |
| | ATGTCAGCTTTCGTTGAAAAGAGAGAAGCTAACTTTATAAAAGGGTAA |
| pbt | ATGAGAAGTTTTGAAGAAGTAATTAAGTTTGCAAAAGAAAGAGGACCTAA |
| SEQ ID NO: 7 | AACTATATCAGTAGCATGTTGCCAAGATAAAGAAGTTTTAATGGCAGTTG |
| | AAATGGCTAGAAAAGAAAAAATAGCAAATGCCATTTTAGTAGGAGATATA |
| | GAAAAGACTAAAGAAATTGCAAAAAGCATAGACATGGATATCGAAAATTA |
| | TGAACTGATAGATATAAAAGATTTAGCAGAAGCATCTCTAAAATCTGTTG |
| | AATTAGTTTCACAAGGAAAAGCCGACATGGTAATGAAAGGCTTAGTAGAC |
| | ACATCAATAATACTAAAAGCAGTTTTAAATAAAGAAGTAGGTCTTAGAAC |
| | TGGAAATGTATTAAGTCACGTAGCAGTATTTGATGTAGAGGGATATGATA |
| | GATTATTTTTCGTAACTGACGCAGCTATGAACTTAGCTCCTGATACAAAT |
| | ACTAAAAAGCAAATCATAGAAAATGCTTGCACAGTAGCACATTCATTAGA |
| | TATAAGTGAACCAAAAGTTGCTGCAATATGCGCAAAAGAAAAAGTAAATC |
| | CAAAAATGAAAGATACAGTTGAAGCTAAAGAACTAGAAGAAATGTATGAA |
| | AGAGGAGAAATCAAAGGTTGTATGGTTGGTGGGCCTTTTGCAATTGATAA |
| | TGCAGTATCTTTAGAAGCAGCTAAACATAAAGGTATAAATCATCCTGTAG |
| | CAGGACGAGCTGATATATTATTAGCCCCAGATATTGAAGGTGGTAACATA |
| | TTATATAAAGCTTTGGTATTCTTCTCAAAATCAAAAAATGCAGGAGTTAT |
| | AGTTGGGGCTAAAGCACCAATAATATTAACTTCTAGAGCAGACAGTGAAG |
| | AAACTAAACTAAACTCAATAGCTTTAGGTGTTTTAATGGCAGCAAAGGCA |
| | TAA |
| buk | ATGAGCAAAATATTTAAAATCTTAACAATAAATCCTGGTTCGACATCAAC |
| SEQ ID NO: 8 | TAAAATAGCTGTATTTGATAATGAGGATTTAGTATTTGAAAAAACTTTAA |
| | GACATTCTTCAGAAGAAATAGGAAAATATGAGAAGGTGTCTGACCAATTT |
| | GAATTTCGTAAACAAGTAATAGAAGAAGCTCTAAAAGAAGGTGGAGTAAA |
| | AACATCTGAATTAGATGCTGTAGTAGGTAGAGGAGGACTTCTTAAACCTA |
| | TAAAAGGTGGTACTTATTCAGTAAGTGCTGCTATGATTGAAGATTTAAAA |
| | GTGGGAGTTTTAGGAGAACACGCTTCAAACCTAGGTGGAATAATAGCAAA |
| | ACAAATAGGTGAAGAAGTAAATGTTCCTTCATACATAGTAGACCCTGTTG |
| | TTGTAGATGAATTAGAAGATGTTGCTAGAATTTCTGGTATGCCTGAAATA |
| | AGTAGAGCAAGTGTAGTACATGCTTTAAATCAAAAGGCAATAGCAAGAAG |
| | ATATGCTAGAGAAATAAACAAGAAATATGAAGATATAAATCTTATAGTTG |
| | CACACATGGGTGGAGGAGTTTCTGTTGGAGCTCATAAAAATGGTAAAATA |
| | GTAGATGTTGCAAACGCATTAGATGGAGAAGGACCTTTCTCTCCAGAAAG |
| | AAGTGGTGGACTACCAGTAGGTGCATTAGTAAAAATGTGCTTTAGTGGAA |
| | AATATACTCAAGATGAAATTAAAAAGAAAATAAAAGGTAATGGCGGACTA |
| | GTTGCATACTTAAACACTAATGATGCTAGAGAAGTTGAAGAAAGAATTGA |
| | AGCTGGTGATGAAAAAGCTAAATTAGTATATGAAGCTATGGCATATCAAA |
| | TCTCTAAAGAAATAGGAGCTAGTGCTGCAGTTCTTAAGGGAGATGTAAAA |
| | GCAATATTATTAACTGGTGGAATCGCATATTCAAAAATGTTTACAGAAAT |
| | GATTGCAGATAGAGTTAAATTTATAGCAGATGTAAAAGTTTATCCAGGTG |
| | AAGATGAAATGATTGCATTAGCTCAAGGTGGACTTAGAGTTTTAACTGGT |
| | GAAGAAGAGGCTCAAGTTTATGATAACTAA |
| ter | ATGATCGTAAAACCTATGGTACGCAACAATATCTGCCTGAACGCCCATCC |
| SEQ ID NO: 9 | TCAGGGCTGCAAGAAGGGAGTGGAAGATCAGATTGAATATACCAAGAAAC |
| | GCATTACCGCAGAAGTCAAAGCTGGCGCAAAAGCTCCAAAAAACGTTCTG |
| | GTGCTTGGCTGCTCAAATGGTTACGGCCTGGCGAGCCGCATTACTGCTGC |
| | GTTCGGATACGGGGCTGCGACCATCGGCGTGTCCTTTGAAAAAGCGGGTT |
| | CAGAAACCAAATATGGTACACCGGGATGGTACAATAATTTGGCATTTGAT |
| | GAAGCGGCAAAACGCGAGGGTCTTTATAGCGTGACGATCGACGGCGATGC |
| | GTTTTCAGACGAGATCAAGGCCCAGGTAATTGAGGAAGCCAAAAAAAAAG |
| | GTATCAAATTTGATCTGATCGTATACAGCTTGGCCAGCCCAGTACGTACT |
| | GATCCTGATACAGGTATCATGCACAAAAGCGTTTTGAAACCCTTTGGAAA |
| | AACGTTCACAGGCAAAACAGTAGATCCGTTTACTGGCGAGCTGAAGGAAA |
| | TCTCCGCGGAACCAGCAAATGACGAGGAAGCAGCCGCCACTGTTAAAGTT |
| | ATGGGGGGTGAAGATTGGGAACGTTGGATTAAGCAGCTGTCGAAGGAAGG |
| | CCTCTTAGAAGAAGGCTGTATTACCTTGGCCTATAGTTATATTGGCCCTG |
| | AAGCTACCCAAGCTTTGTACCGTAAAGGCACAATCGGCAAGGCCAAAGAA |
| | CACCTGGAGGCCACAGCACACCGTCTCAACAAAGAGAACCCGTCAATCCG |
| | TGCCTTCGTGAGCGTGAATAAAGGCCTGGTAACCCGCGCAAGCGCCGTAA |
| | TCCCGGTAATCCCTCTGTATCTCGCCAGCTTGTTCAAAGTAATGAAAGAG |
| | AAGGGCAATCATGAAGGTTGTATTGAACAGATCACGCGTCTGTACGCCGA |
| | GCGCCTGTACCGTAAAGATGGTACAATTCCAGTTGATGAGGAAAATCGCA |
| | TTCGCATTGATGATTGGGAGTTAGAAGAAGACGTCCAGAAAGCGGTATCC |
| | GCGTTGATGGAGAAAGTCACGGGTGAAAACGCAGAATCTCTCACTGACTT |
| | AGCGGGGTACCGCCATGATTTCTTAGCTAGTAACGGCTTTGATGTAGAAG |
| | GTATTAATTATGAAGCGGAAGTTGAACGCTTCGACCGTATCTGA |
| tesB | ATGAGTCAGGCGCTAAAAAATTTACTGACATTGTTAAATCTGGAAAAAAT |
| SEQ ID NO: 10 | TGAGGAAGGACTCTTTCGCGGCCAGAGTGAAGATTTAGGTTTACGCCAGG |
| | TGTTTGGCGGCCAGGTCGTGGGTCAGGCCTTGTATGCTGCAAAAGAGACC |
| | GTCCCTGAAGAGCGGCTGGTACATTCGTTTCACAGCTACTTTCTTCGCCC |
| | TGGCGATAGTAAGAAGCCGATTATTTATGATGTCGAAACGCTGCGTGACG |
| | GTAACAGCTTCAGCGCCCGCCGGGTTGCTGCTATTCAAAACGGCAAACCG |
| | ATTTTTTATATGACTGCCTCTTTCCAGGCACCAGAAGCGGGTTTCGAACA |
| | TCAAAAAACAATGCCGTCCGCGCCAGCGCCTGATGGCCTCCCTTCGGAAA |
| | CGCAAATCGCCCAATCGCTGGCGCACCTGCTGCCGCCAGTGCTGAAAGAT |
| | AAATTCATCTGCGATCGTCCGCTGGAAGTCCGTCCGGTGGAGTTTCATAA |
| | CCCACTGAAAGGTCACGTCGCAGAACCACATCGTCAGGTGTGGATCCGCG |
| | CAAATGGTAGCGTGCCGGATGACCTGCGCGTTCATCAGTATCTGCTCGGT |
| | TACGCTTCTGATCTTAACTTCCTGCCGGTAGCTCTACAGCCGCACGGCAT |
| | CGGTTTTCTCGAACCGGGGATTCAGATTGCCACCATTGACCATTCCATGT |
| | GGTTCCATCGCCCGTTTAATTTGAATGAATGGCTGCTGTATAGCGTGGAG |
| | AGCACCTCGGCGTCCAGCGCACGTGGCTTTGTGCGCGGTGAGTTTTATAC |
| | CCAAGACGGCGTACTGGTTGCCTCGACCGTTCAGGAAGGGGTGATGCGTA |
| | ATCACAATTAA |

[0245] Exemplary polypeptide sequences for the production of butyrate by the genetically engineered bacteria are provided in Table 3.

TABLE 3
Exemplary Polypeptide Sequences
for Butyrate Production

| Description | Sequence |
|---|---|
| Bcd2 | MDLNSKKYQMLKELYVSFAENEVKPLATELDEEER |
| SEQ ID NO: 11 | FPYETVEKMAKAGMMGIPYPKEYGGEGGDTVGYIM |
| | AVEELSRVCGTTGVILSAHTSLGSWPIYQYGNEEQK |
| | QKFLRPLASGEKLGAFGLTEPNAGTDASGQQTTAVL |
| | DGDEYILNGSKIFITNAIAGDIYVVMAMTDKSKGNK |
| | GISAFIVEKGTPGFSFGVKEKKMGIRGSATSELIFEDC |
| | RIPKENLLGKEGQGFKIAMSTLDGGRIGIAAQALGLA |
| | QGALDETVKYVKERVQFGRPLSKFQNTQFQLADME |
| | VKVQAARHLVYQAAINKDLGKPYGVEAAMAKLFA |
| | AETAMEVTTKAVQLHGGYGYTRDYPVERMMRDAK |
| | ITEIYEGTSEVQRMVISGKLLK |
| etfB3 | MNIVVCIKQVPDTTEVKLDPNTGTLIRDGVPSIINPDD |
| SEQ ID NO: 12 | KAGLEEAIKLKEEMGAHVTVITMGPPQADMALKEA |
| | LAMGADRGILLTDRAFAGADTWATSSALAGALKNI |
| | DFDIIIAGRQAIDGDTAQVGPQIAEHLNLPSITYAEEIK |
| | TEGEYVLVKRQFEDCCHDLKVKMPCLITTLKDMNT |
| | PRYMKVGRIYDAFENDVVETWTVKDIEVDPSNLGL |
| | KGSPTSVFKSFTKSVKPAGTIYNEDAKTSAGIIIDKLK |
| | EKYII |
| etfA3 | MGNVLVVIEQRENVIQTVSLELLGKATEIAKDYDTK |
| SEQ ID NO: 13 | VSALLLGSKVEGLIDTLAHYGADEVIVVDDEALAVY |
| | TTEPYTKAAYEAIKAADPIVVLFGATSIGRDLAPRVS |
| | ARIHTGLTADCTGLAVAEDTKLLLMTRPAFGGNIMA |
| | TIVCKDFRPQMSTVRPGVMKKNEPDETKEAVINRFK |
| | VEFNDADKLVQVVQVIKEAKKQVKIEDAKILVSAGR |
| | GMGGKENLDILYELAEIIGGEVSGSRATIDAGWLDK |
| | ARQVGQTGKTVRPDLYIACGISGAIQHIAGMEDAEFI |
| | VAINKNPEAPIFKYADVGIVGDVHKVLPELISQLSVA |
| | KEKGEVLAN |
| Ter | MIVKPMVRNNICLNAHPQGCKKGVEDQIEYTKKRIT |
| SEQ ID NO: 14 | AEVKAGAKAPKNVLVLGCSNGYGLASRITAAFGYG |
| | AATIGVSFEKAGSETKYGTPGWYNNLAFDEAAKRE |
| | GLYSVTIDGDAFSDEIKAQVIEEAKKKGIKFDLIVYSL |
| | ASPVRTDPDTGIMHKSVLKPFGKTFTGKTVDPFTGEL |
| | KEISAEPANDEEAAATVKVMGGEDWERWIKQLSKE |
| | GLLEEGCITLAYSYIGPEATQALYRKGTIGKAKEHLE |
| | ATAHRLNKENPSIRAFVSVNKGLVTRASAVIPVIPLY |
| | LASLEKVMKEKGNHEGCIEQITRLYAERLYRKDGTIP |
| | VDEENRIRIDDWELEEDVQKAVSALMEKVTGENAES |
| | LTDLAGYRHDFLASNGFDVEGINYEAEVERFDRI |
| ThiA | MREVVIASAARTAVGSFGGAFKSVSAVELGVTAAK |
| SEQ ID NO: 15 | EAIKRANITPDMIDESLLGGVLTAGLGQNIARQIALG |
| | AGIPVEKPAMTINIVCGSGLRSVSMASQLIALGDADI |
| | MLVGGAENMSMSPYLVPSARYGARMGDAAFVDSM |
| | IKDGLSDIFNNYHMGITAENIAEQWNITREEQDELAL |
| | ASQNKAEKAQAEGKFDEEIVPVVIKGRKGDTVVDK |
| | DEYIKPGTTMEKLAKLRPAFKKDGTVTAGNASGIND |
| | GAAMLVVMAKEKAEELGIEPLATIVSYGTAGVDPKI |
| | MGYGPVPATKKALEAANMTIEDIDLVEANEAFAAQ |
| | SVAVIRDLNIDMNKVNVNGGAIAIGHPIGCSGARILT |
| | TLLYEMKRRDAKTGLATLCIGGGMGTTLIVKR |
| Hbd | MKLAVIGSGTMGSGIVQTFASCGHDVCLKSRTQGAI |
| SEQ ID NO: 16 | DKCLALLDKNLTKLVTKGKMDEATKAEILSHVSSTT |
| | NYEDLKDMDLIIEASVEDMNIKKDVFKLLDELCKED |
| | TILATNTSSLSITEIASSTKRPDKVIGMHFFNPVPMMK |
| | LVEVISGQLTSKVTFDTVFELSKSINKVPVDVSESPGF |
| | VVNRILIPMINEAVGIYADGVASKEEIDEAMKLGAN |
| | HPMGPLALGDLIGLDVVLAIMNVLYTEFGDTKYRPH |
| | PLLAKMVRANQLGRKTKIGFYDYNK |
| Crt2 | MSTSDVKVYENVAVEVDGNICTVKMNRPKALNAIN |
| SEQ ID NO: 17 | SKTLEELYEVFVDINNDETIDVVILTGEGKAFVAGAD |
| | IAYMKDLDAVAAKDFSILGAKAFGEIENSKKVVIAA |
| | VNGFALGGGCELAMACDIRIASAKAKFGQPEVTLGI |
| | TPGYGGTQRLTRLVGMAKAKELIFTGQVIKADEAEK |
| | IGLVNRVVEPDILIEEVEKLAKIIAKNAQLAVRYSKE |
| | AIQLGAQTDINTGIDIESNLFGLCFSTKDQKEGMSAF |
| | VEKREANFIKG |
| Pbt | MRSFEEVIKFAKERGPKTISVACCQDKEVLMAVEMA |
| SEQ ID NO: 18 | RKEKIANAILVGDIEKTKEIAKSIDMDIENYELIDIKD |
| | LAEASLKSVELVSQGKADMVMKGLVDTSIILKAVLN |
| | KEVGLRTGNVLSHVAVFDVEGYDRLFFVTDAAMNL |
| | APDTNTKKQIIENACTVAHSLDISEPKVAAICAKEKV |
| | NPKMKDTVEAKELEEMYERGEIKGCMVGGPFAIDN |
| | AVSLEAAKHKGINHPVAGRADILLAPDIEGGNILYKA |
| | LVFFSKSKNAGVIVGAKAPIILTSRADSEETKLNSIAL |
| | GVLMAAKA |
| Buk | MSKIFKILTINPGSTSTKIAVFDNEDLVFEKTLRHSSE |
| SEQ ID NO: 19 | EIGKYEKVSDQFEFRKQVIEEALKEGGVKTSELDAV |
| | VGRGGLLKPIKGGTYSVSAAMIEDLKVGVLGEHASN |
| | LGGIIAKQIGEEVNVPSYIVDPVVVDELEDVARISGM |
| | PEISRASVVHALNQKAIARRYAREINKKYEDINLIVA |
| | HMGGGVSVGAHKNGKIVDVANALDGEGPFSPERSG |
| | GLPVGALVKMCFSGKYTQDEIKKKIKGNGGLVAYL |
| | NTNDAREVEERIEAGDEKAKLVYEAMAYQISKEIGA |
| | SAAVLKGDVKAILLTGGIAYSKMFTEMIADRVKFIA |
| | DVKVYPGEDEMIALAQGGLRVLTGEEEAQVYDN |
| TesB | MSQALKNLLTLLNLEKIEEGLFRGQSEDLGLRQVFG |
| SEQ ID NO: 20 | GQVVGQALYAAKETVPEERLVHSFHSYFLRPGDSKK |
| | PIIYDVETLRDGNSFSARRVAAIQNGKPIFYMTASFQ |
| | APEAGFEHQKTMPSAPAPDGLPSETQIAQSLAHLLPP |
| | VLKDKFICDRPLEVRPVEFHNPLKGHVAEPHRQVWI |
| | RANGSVPDDLRVHQYLLGYASDLNFLPVALQPHGIG |
| | FLEPGIQIATIDHSMWFHRPFNLNEWLLYSVESTSAS |
| | SARGFVRGEFYTQDGVLVASTVQEGVMRNHN* |

[0246] The gene products of the bcd2, etfA13, and etfB3 genes in Clostridium difficile form a complex that converts crotonyl-CoA to butyryl-CoA, which may function as an oxygen-dependent co-oxidant. In some embodiments, because the genetically engineered bacteria of the invention are designed to produce butyrate in a microaerobic or oxygen-limited environment, e.g., the mammalian gut, oxygen dependence could have a negative effect on butyrate production in the gut. It has been shown that a single gene from Treponema denticola (ter, encoding trans-2-enoynl-CoA reductase) can functionally replace this three-gene complex in an oxygen-independent manner. In some embodiments, the genetically engineered bacteria comprise a ter gene, e.g., from Treponema denticola, which can functionally replace all three of the bcd2, etfB3, and etfA3 genes, e.g., from Peptoclostridium difficile. In this embodiment, the genetically engineered bacteria comprise thiA1, hbd, crt2, pbt, and buk, e.g., from Peptoclostridium difficile, and ter, e.g., from Treponema denticola, and produce butyrate in low-oxygen conditions, in the presence of certain molecules or metabolites, in the presence of molecules or metabolites associated with inflammation or an inflammatory response, or in the presence of some other metabolite that may or may not be present in the gut, such as arabinose.

[0247] In some embodiments, the genetically engineered bacteria of the invention comprise thiA1, hbd, crt2, pbt, and buk, e.g., from Peptoclostridium difficile; ter, e.g., from Treponema denticola; one or more of bcd2, etfB3, and etfA3, e.g., from Peptoclostridium difficile; and produce butyrate in low-oxygen conditions, in the presence of certain molecules or metabolites, in the presence of molecules or metabolites associated with inflammation or an inflammatory response, or in the presence of some other metabolite that may or may not be present in the gut, such as arabinose. In some embodiments, one or more of the butyrate biosynthesis genes is functionally replaced, modified, and/or mutated in order to enhance stability and/or increase butyrate production in low-oxygen conditions, in the presence of certain molecules or metabolites, in the presence of molecules or metabolites associated with inflammation or an inflammatory response, or in the presence of some other metabolite that may or may not be present in the gut, such as arabinose.

[0248] The gene products of pbt and buk convert butyrylCoA to Butyrate. In some embodiments, the pbt and buk genes can be replaced by a tesB gene. tesB can be used to cleave off the CoA from butyryl-coA. In one embodiment, the genetically engineered bacteria comprise bcd2, etfB3, etfA3, thiA1, hbd, and crt2, e.g., from Peptoclostridium difficile, and tesB from E. coli and produce butyrate in low-oxygen conditions, in the presence of molecules or metabolites, in the presence of molecules or metabolites associated with inflammation or an inflammatory response, or in the presence of some other metabolite that may or may not be present in the gut, such as arabinose. In one embodiment, the genetically engineered bacteria comprise ter gene (encoding trans-2-enoynl-CoA reductase) e.g., from Treponema denticola, thiA1, hbd, crt2, pbt, and buk, e.g., from Peptoclostridium difficile, and tesB from E. coli, and produce butyrate in low-oxygen conditions, in the presence of specific molecules or metabolites, in the presence of molecules or metabolites associated with inflammation or an inflammatory response, or in the presence of some other metabolite that may or may not be present in the gut, such as arabinose. In some embodiments, one or more of the butyrate biosynthesis genes is functionally replaced, modified, and/or mutated in order to enhance stability and/or increase butyrate production in low-oxygen conditions or in the presence of specific molecules or metabolites, or molecules or metabolites associated with condition(s) such as inflammation or an inflammatory response, or in the presence of some other metabolite that may or may not be present in the gut, such as arabinose.

[0249] In some embodiments, the local production of butyrate induces the differentiation of regulatory T cells in the gut and/or promotes the barrier function of colonic epithelial cells. In some embodiments, the genetically engineered bacteria comprise genes for aerobic butyrate biosynthesis and/or genes for anaerobic or microaerobic butyrate biosynthesis. In some embodiments, local butyrate production reduces gut inflammation, a symptom of IBD and other gut related disorders.

[0250] In one embodiment, the bcd2 gene has at least about 80% identity with SEQ ID NO: 1. In another embodiment, the bcd2 gene has at least about 85% identity with SEQ ID NO: 1. In one embodiment, the bcd2 gene has at least about 90% identity with SEQ ID NO: 1. In one embodiment, the bcd2 gene has at least about 95% identity with SEQ ID NO: 1. In another embodiment, the bcd2 gene has at least about 96%, 97%, 98%, or 99% identity with SEQ ID NO: 1. Accordingly, in one embodiment, the bcd2 gene has at least about 80%, 81%, 82%, 83%, 84%, 85%, 86%, 87%, 88%, 89%, 90%, 91%, 92%, 93%, 94%, 95%, 96%, 97%, 98%, or 99% identity with SEQ ID NO: 1. In another embodiment, the bcd2 gene comprises the sequence of SEQ ID NO: 1. In yet another embodiment the bcd2 gene consists of the sequence of SEQ ID NO: 1.

[0251] In one embodiment, the etfB3 gene has at least about 80% identity with SEQ ID NO: 2. In another embodiment, the etfB3 gene has at least about 85% identity with SEQ ID NO: 2. In one embodiment, the etfB3 gene has at least about 90% identity with SEQ ID NO: 2. In one embodiment, the etfB3 gene has at least about 95% identity with SEQ ID NO: 2. In another embodiment, the etfB3 gene has at least about 96%, 97%, 98%, or 99% identity with SEQ ID NO: 2. Accordingly, in one embodiment, the etfB3 gene has at least about 80%, 81%, 82%, 83%, 84%, 85%, 86%, 87%, 88%, 89%, 90%, 91%, 92%, 93%, 94%, 95%, 96%, 97%, 98%, or 99% identity with SEQ ID NO: 2. In another embodiment, the etfB33 gene comprises the sequence of SEQ ID NO: 2. In yet another embodiment the etfB3 gene consists of the sequence of SEQ ID NO: 2.

[0252] In one embodiment, the etfA3 gene has at least about 80% identity with SEQ ID NO: 3. In another embodiment, the etfA3 gene has at least about 85% identity with SEQ ID NO: 3. In one embodiment, the etfA3 gene has at least about 90% identity with SEQ ID NO: 3. In one embodiment, the etfA3 gene has at least about 95% identity with SEQ ID NO: 3. In another embodiment, the etfA3 gene has at least about 96%, 97%, 98%, or 99% identity with SEQ ID NO: 3. Accordingly, in one embodiment, the etfA3 gene has at least about 80%, 81%, 82%, 83%, 84%, 85%, 86%, 87%, 88%, 89%, 90%, 91%, 92%, 93%, 94%, 95%, 96%, 97%, 98%, or 99% identity with SEQ ID NO: 3. In another embodiment, the etfA3 gene comprises the sequence of SEQ ID NO: 3. In yet another embodiment the etfA3 gene consists of the sequence of SEQ ID NO: 3.

[0253] In one embodiment, the thiA1 gene has at least about 80% identity with SEQ ID NO: 4. In another embodiment, the thiA1 gene has at least about 85% identity with SEQ ID NO: 4. In one embodiment, the thiA1 gene has at least about 90% identity with SEQ ID NO: 4. In one embodiment, the thiA1 gene has at least about 95% identity with SEQ ID NO: 4. In another embodiment, the thiA1 gene has at least about 96%, 97%, 98%, or 99% identity with SEQ ID NO: 4. Accordingly, in one embodiment, the thiA1 gene has at least about 80%, 81%, 82%, 83%, 84%, 85%, 86%, 87%, 88%, 89%, 90%, 91%, 92%, 93%, 94%, 95%, 96%, 97%, 98%, or 99% identity with SEQ ID NO: 4. In another embodiment, the thiA1 gene comprises the sequence of SEQ ID NO: 4. In yet another embodiment the thiA1 gene consists of the sequence of SEQ ID NO: 4.

[0254] In one embodiment, the hbd gene has at least about 80% identity with SEQ ID NO: 5. In another embodiment, the hbd gene has at least about 85% identity with SEQ ID NO: 5. In one embodiment, the hbd gene has at least about 90% identity with SEQ ID NO: 5. In one embodiment, the hbd gene has at least about 95% identity with SEQ ID NO: 5. In another embodiment, the hbd gene has at least about 96%, 97%, 98%, or 99% identity with SEQ ID NO: 5. Accordingly, in one embodiment, the hbd gene has at least about 80%, 81%, 82%, 83%, 84%, 85%, 86%, 87%, 88%, 89%, 90%, 91%, 92%, 93%, 94%, 95%, 96%, 97%, 98%, or 99% identity with SEQ ID NO: 5. In another embodiment, the hbd gene comprises the sequence of SEQ ID NO: 5. In yet another embodiment the hbd gene consists of the sequence of SEQ ID NO: 5.

[0255] In one embodiment, the crt2 gene has at least about 80% identity with SEQ ID NO: 6. In another embodiment, the crt2 gene has at least about 85% identity with SEQ ID NO: 6. In one embodiment, the crt2 gene has at least about 90% identity with SEQ ID NO: 6. In one embodiment, the crt2 gene has at least about 95% identity with SEQ ID NO: 6. In another embodiment, the crt2 gene has at least about 96%, 97%, 98%, or 99% identity with SEQ ID NO: 6. Accordingly, in one embodiment, the crt2 gene has at least about 80%, 81%, 82%, 83%, 84%, 85%, 86%, 87%, 88%, 89%, 90%, 91%, 92%, 93%, 94%, 95%, 96%, 97%, 98%, or 99% identity with SEQ ID NO: 6. In another embodiment, the crt2 gene comprises the sequence of SEQ ID NO: 6. In yet another embodiment the crt2 gene consists of the sequence of SEQ ID NO: 6.

[0256] In one embodiment, the pbt gene has at least about 80% identity with SEQ ID NO: 7. In another embodiment, the pbt gene has at least about 85% identity with SEQ ID NO: 7. In one embodiment, the pbt gene has at least about 90% identity with SEQ ID NO: 7. In one embodiment, the pbt gene has at least about 95% identity with SEQ ID NO: 7. In another embodiment, the pbt gene has at least about 96%, 97%, 98%, or 99% identity with SEQ ID NO: 7. Accordingly, in one embodiment, the pbt gene has at least about 80%, 81%, 82%, 83%, 84%, 85%, 86%, 87%, 88%, 89%, 90%, 91%, 92%, 93%, 94%, 95%, 96%, 97%, 98%, or 99% identity with SEQ ID NO: 7. In another embodiment, the pbt gene comprises the sequence of SEQ ID NO: 7. In yet another embodiment the pbt gene consists of the sequence of SEQ ID NO: 7.

[0257] In one embodiment, the buk gene has at least about 80% identity with SEQ ID NO: 8. In another embodiment, the buk gene has at least about 85% identity with SEQ ID NO: 8. In one embodiment, the buk gene has at least about 90% identity with SEQ ID NO: 8. In one embodiment, the buk gene has at least about 95% identity with SEQ ID NO: 8. In another embodiment, the buk gene has at least about 96%, 97%, 98%, or 99% identity with SEQ ID NO: 8. Accordingly, in one embodiment, the buk gene has at least about 80%, 81%, 82%, 83%, 84%, 85%, 86%, 87%, 88%, 89%, 90%, 91%, 92%, 93%, 94%, 95%, 96%, 97%, 98%, or 99% identity with SEQ ID NO: 8. In another embodiment, the buk gene comprises the sequence of SEQ ID NO: 8. In yet another embodiment the buk gene consists of the sequence of SEQ ID NO: 8.

[0258] In one embodiment, the ter gene has at least about 80% identity with SEQ ID NO: 9. In another embodiment, the ter gene has at least about 85% identity with SEQ ID NO: 9. In one embodiment, the ter gene has at least about 90% identity with SEQ ID NO: 9. In one embodiment, the ter gene has at least about 95% identity with SEQ ID NO: 9. In another embodiment, the ter gene has at least about 96%, 97%, 98%, or 99% identity with SEQ ID NO: 9. Accordingly, in one embodiment, the ter gene has at least about 80%, 81%, 82%, 83%, 84%, 85%, 86%, 87%, 88%, 89%, 90%, 91%, 92%, 93%, 94%, 95%, 96%, 97%, 98%, or 99% identity with SEQ ID NO: 9. In another embodiment, the ter gene comprises the sequence of SEQ ID NO: 9. In yet another embodiment the ter gene consists of the sequence of SEQ ID NO: 9.

[0259] In one embodiment, the tesB gene has at least about 80% identity with SEQ ID NO: 10. In another embodiment, the tesB gene has at least about 85% identity with SEQ ID NO: 10. In one embodiment, the tesB gene has at least about 90% identity with SEQ ID NO: 10. In one embodiment, the tesB gene has at least about 95% identity with SEQ ID NO: 10. In another embodiment, the tesB gene has at least about 96%, 97%, 98%, or 99% identity with SEQ ID NO: 10. Accordingly, in one embodiment, the tesB gene has at least about 80%, 81%, 82%, 83%, 84%, 85%, 86%, 87%, 88%, 89%, 90%, 91%, 92%, 93%, 94%, 95%, 96%, 97%, 98%, or 99% identity with SEQ ID NO: 10. In another embodiment, the tesB gene comprises the sequence of SEQ ID NO: 10. In yet another embodiment the tesB gene consists of the sequence of SEQ ID NO: 10.

[0260] In one embodiment, one or more polypeptides encoded by the butyrate circuits and expressed by the genetically engineered bacteria have at least about 80% identity with one or more of SEQ ID NO: 11 through SEQ ID NO: 20. In another embodiment, one or more polypeptides encoded by the butyrate circuits and expressed by the genetically engineered bacteria have at least about 85% identity with one or more of SEQ ID NO: 11 through SEQ ID NO: 20. In one embodiment, one or more polypeptides encoded by the butyrate circuits and expressed by the genetically engineered bacteria have at least about 90% identity with one or more of SEQ ID NO: 11 through SEQ ID NO: 20. In one embodiment, one or more polypeptides encoded by the butyrate circuits and expressed by the genetically engineered bacteria have at least about 95% identity with one or more of SEQ ID NO: 11 through SEQ ID NO: 20. In another embodiment, one or more polypeptides encoded by the butyrate circuits and expressed by the genetically engineered bacteria have at least about 96%, 97%, 98%, or 99% identity with one or more of SEQ ID NO: 11 through SEQ ID NO: 20. Accordingly, in one embodiment, one or more polypeptides encoded by the butyrate circuits and expressed by the genetically engineered bacteria have at least about 80%, 81%, 82%, 83%, 84%, 85%, 86%, 87%, 88%, 89%, 90%, 91%, 92%, 93%, 94%, 95%, 96%, 97%, 98%, or 99% identity with one or more of SEQ ID NO: 11 through SEQ ID NO: 20. In another embodiment, one or more polypeptides encoded by the butyrate circuits and expressed by the genetically engineered bacteria one or more polypeptides encoded by the butyrate circuits and expressed by the genetically engineered bacteria comprise the sequence of with one or more of SEQ ID NO: 11 through SEQ ID NO: 20. In yet another embodiment one or more polypeptides encoded by the butyrate circuits and expressed by the genetically engineered bacteria consist of the sequence of with one or more of SEQ ID NO: 11 through SEQ ID NO: 20.

[0261] In some embodiments, one or more of the butyrate biosynthesis genes is a synthetic butyrate biosynthesis gene. In some embodiments, one or more of the butyrate biosynthesis genes is a Treponema denticola butyrate biosynthesis gene. In some embodiments, one or more of the butyrate biosynthesis genes is a C. glutamicum butyrate biosynthesis gene. In some embodiments, one or more of the butyrate biosynthesis genes is a Peptoclostridicum difficile butyrate biosynthesis gene. The butyrate gene cassette may comprise genes for the aerobic biosynthesis of butyrate and/or genes for the anaerobic or microaerobic biosynthesis of butyrate.

[0262] To improve acetate production, while maintaining high levels of butyrate production, one or more targeted deletions can be introduced in competing metabolic arms of mixed acid fermentation to prevent the production of alternative metabolic fermentative byproducts (thereby simultaneously increasing butyrate and acetate production). Non-limiting examples of such competing metabolic arms are frdA (converts phosphoenolpyruvate to succinate), ldhA (converts pyruvate to lactate) and adhE (converts Acetyl-CoA to Ethanol). Deletions which may be introduced therefore include deletion of adhE, ldh, and frd. Thus, in certain embodiments, the genetically engineered bacteria comprise one or more butyrate-producing cassette(s) and further comprise mutations and/or deletions in one or more of frdA, ldhA, and adhE genes.

[0263] In some embodiments, the genetically engineered bacteria comprise one or more butyrate producing cassette(s) described herein and one or more mutation(s) and/or deletion(s) in one or more genes selected from the ldhA gene, the frdA gene and the adhE gene.

[0264] In some embodiments, the genetically engineered bacteria comprise one or more gene sequence(s) encoding one or more enzymes for the production of butyrate and further comprise a mutation and/or deletion in one or more endogenous genes selected from in the ldhA gene, the frdA gene and the adhE genes. In some embodiments, the genetically engineered bacteria comprise one or more gene sequence(s) encoding one or more enzymes for the production of butyrate and further comprise a mutation and/or deletion in the endogenous ldhA gene. In some embodiments, the genetically engineered bacteria comprise one or more gene sequence(s) encoding one or more enzymes for the production of butyrate and further comprise a mutation and/or deletion in the endogenous adhE gene. In some embodiments, the genetically engineered bacteria comprise one or more gene sequence(s) encoding one or more enzymes for the production of butyrate and further comprise a mutation and/or deletion in the endogenous frdA gene. In some embodiments, the genetically engineered bacteria comprise one or more gene sequence(s) encoding one or more enzymes for the production of butyrate and further comprise a mutation and/or deletion in the endogenous ldhA and rdA genes. In some embodiments, the genetically engineered bacteria comprise one or more gene sequence(s) encoding one or more enzymes for the production of butyrate and further comprise a mutation and/or deletion in the endogenous ldhA genes and adhE genes. In some embodiments, the genetically engineered bacteria comprise one or more gene sequence(s) encoding one or more enzymes for the production of butyrate and further comprise a mutation and/or deletion in the endogenous frdA and adhE genes. In some embodiments, the genetically engineered bacteria comprise one or more gene sequence(s) encoding one or more enzymes for the production of butyrate and further comprise a mutation and/or deletion in the endogenous ldhA, the frdA, and adhE genes. In some embodiments, the genetically engineered bacteria comprise one or more gene sequence(s) encoding one or more enzymes for the production of butyrate and further comprise a mutation and/or deletion in one or more endogenous genes selected from in the ldhA gene, the frdA gene and the adhE genes.

[0265] In some embodiments, the genetically engineered bacteria comprise one or more gene sequence(s) selected from ter, thiA1, hbd, crt2, pbt, and/or buk and further comprise a mutation and/or deletion in the endogenous ldhA gene. In some embodiments, the genetically engineered bacteria comprise one or more gene sequence(s) comprising one or more ter-thiA1-hbd-crt2-pbt-buk gene cassette(s) and further comprise a mutation and/or deletion in the endogenous ldhA gene. In some embodiments, the genetically engineered bacteria comprise one or more gene sequence(s) selected from ter, thiA1, hbd, crt2, pbt, and/or buk and further comprise a mutation and/or deletion in the endogenous adhE gene. In some embodiments, the genetically engineered bacteria comprise one or more gene sequence(s) comprising one or more ter-thiA1-hbd-crt2-pbt-buk gene cassette(s) and further comprise a mutation and/or deletion in the endogenous adhE gene. In some embodiments, the genetically engineered bacteria comprise one or more gene sequence(s) selected from ter, thiA1, hbd, crt2, pbt, and/or buk and further comprise a mutation and/or deletion in the endogenous frdA gene. In some embodiments, the genetically engineered bacteria comprise one or more gene sequence(s) comprising one or more ter-thiA1-hbd-crt2-pbt-buk gene cassette(s) and further comprise a mutation and/or deletion in the endogenous frdA gene. In some embodiments, the genetically engineered bacteria comprise one or more gene sequence(s) selected from ter, thiA1, hbd, crt2, pbt, and/or buk and further comprise a mutation and/or deletion in the endogenous ldhA and frdA genes. In some embodiments, the genetically engineered bacteria comprise one or more gene sequence(s) comprising one or more ter-thiA1-hbd-crt2-pbt-buk gene cassette(s) and further comprise a mutation and/or deletion in the endogenous ldhA and frdA genes. In some embodiments, the genetically engineered bacteria comprise one or more gene sequence(s) selected from ter, thiA1, hbd, crt2, pbt, and/or buk and further comprise a mutation and/or deletion in the endogenous ldhA genes and adhE genes. In some embodiments, the genetically engineered bacteria comprise one or more gene sequence(s) comprising one or more ter-thiA1-hbd-crt2-pbt-buk gene cassette(s) and further comprise a mutation and/or deletion in the endogenous ldhA genes and adhE genes. In some embodiments, the genetically engineered bacteria comprise one or more gene sequence(s) selected from ter, thiA1, hbd, crt2, pbt, and/or buk and further comprise a mutation and/or deletion in the endogenous frdA and adhE genes. In some embodiments, the genetically engineered bacteria comprise one or more gene sequence(s) comprising one or more ter-thiA1-hbd-crt2-pbt-buk gene cassette(s) and further comprise a mutation and/or deletion in the endogenous frdA and adhE genes. In some embodiments, the genetically engineered bacteria comprise one or more gene sequence(s) selected from ter, thiA1, hbd, crt2, pbt, and/or buk and further comprise a mutation and/or deletion in the endogenous ldhA, the frdA, and adhE genes. In some embodiments, the genetically engineered bacteria comprise one or more gene sequence(s) comprising one or more ter-thiA1-hbd-crt2-pbt-buk gene cassette(s) and further comprise a mutation and/or deletion in the endogenous ldhA, the frdA, and adhE genes.

[0266] In some embodiments, the genetically engineered bacteria comprise one or more gene sequence(s) selected from ter, thiA1, hbd, crt2, tesB and further comprise a mutation and/or deletion in the endogenous ldhA gene. In some embodiments, the genetically engineered bacteria comprise one or more gene sequence(s) comprising one or more ter-thiA1-hbd-crt2-tesB gene cassette(s) and further comprise a mutation and/or deletion in the endogenous ldhA gene. In some embodiments, the genetically engineered bacteria comprise one or more gene sequence(s) selected from ter, thiA1, hbd, crt2, tesB and further comprise a mutation and/or deletion in the endogenous adhE gene. In some embodiments, the genetically engineered bacteria comprise one or more gene sequence(s) comprising one or more ter-thiA1-hbd-crt2-tesB gene cassette(s) and further comprise a mutation and/or deletion in the endogenous adhE gene. In some embodiments, the genetically engineered bacteria comprise one or more gene sequence(s) selected from ter, thiA1, hbd, crt2, tesB and further comprise a mutation and/or deletion in the endogenous frdA gene. In some embodiments, the genetically engineered bacteria comprise one or more gene sequence(s) comprising one or more ter-thiA1-hbd-crt2-tesB gene cassette(s) and further comprise a mutation and/or deletion in the endogenous frdA gene. In some embodiments, the genetically engineered bacteria comprise one or more gene sequence(s) selected from ter, thiA1, hbd, crt2, tesB and further comprise a mutation and/or deletion in the endogenous ldhA and frdA genes. In some embodiments, the genetically engineered bacteria comprise one or more gene sequence(s) comprising one or more ter-thiA1-hbd-crt2-tesB gene cassette(s) and further comprise a mutation and/or deletion in the endogenous ldhA and frdA genes. In some embodiments, the genetically engineered bacteria comprise one or more gene sequence(s) selected from ter, thiA1, hbd, crt2, tesB and further comprise a mutation and/or deletion in the endogenous ldhA genes and adhE genes. In some embodiments, the genetically engineered bacteria comprise one or more gene sequence(s) comprising one or more ter-thiA1-hbd-crt2-tesB gene cassette(s) and further comprise a mutation and/or deletion in the endogenous ldhA genes and adhE genes. In some embodiments, the genetically engineered bacteria comprise one or more gene sequence(s) selected from ter, thiA1, hbd, crt2, tesB and further comprise a mutation and/or deletion in the endogenous frdA and adhE genes. In some embodiments, the genetically engineered bacteria comprise one or more gene sequence(s) comprising one or more ter-thiA1-hbd-crt2-tesB gene cassette(s) and further comprise a mutation and/or deletion in the endogenous frdA and adhE genes. In some embodiments, the genetically engineered bacteria comprise one or more gene sequence(s) selected from ter, thiA1, hbd, crt2, tesB and further comprise a mutation and/or deletion in the endogenous ldhA, the frdA, and adhE genes. In some embodiments, the genetically engineered bacteria comprise one or more gene sequence(s) comprising one or more ter-thiA1-hbd-crt2-tesB gene cassette(s) and further comprise a mutation and/or deletion in the endogenous ldhA, the frdA, and adhE genes.

[0267] In some embodiments, the genetically engineered bacteria produce 0% to to 2% to 4%, 4% to 6%, 6% to 8%, 8% to 10%, 10% to 12%, 12% to 14%, 14% to 16%, 16% to 18%, 18% to 20%, 20% to 25%, 25% to 30%, 30% to 35%, 35% to 40%, 40% to 45% 45% to 50%, 50% to 55%, 55% to 60%, 60% to 65%, 65% to 70% to 80%, 80% to 90%, or 90% to 100% more acetate than unmodified bacteria of the same bacterial subtype under the same conditions. In yet another embodiment, the genetically engineered bacteria produce 1.0-1.2-fold, 1.2-1.4-fold, 1.4-1.6-fold, 1.6-1.8-fold, 1.8-2-fold, or two-fold more acetate than unmodified bacteria of the same bacterial subtype under the same conditions. In yet another embodiment, the the genetically engineered bacteria produce three-fold, four-fold, five-fold, six-fold, seven-fold, eight-fold, nine-fold, ten-fold, fifteen-fold, twenty-fold, thirty-fold, fourty-fold, or fifty-fold, more acetate than unmodified bacteria of the same bacterial subtype under the same conditions.

[0268] In some embodiments, the genetically engineered bacteria produce 0% to 2% to 4%, 4% to 6%, 6% to 8%, 8% to 10%, 10% to 12%, 12% to 14%, 14% to 16%, 16% to 18%, 18% to 20%, 20% to 25%, 25% to 30%, 30% to 35%, 35% to 40%, 40% to 45% 45% to 50%, 50% to 55%, 55% to 60%, 60% to 65%, 65% to 70% to 80%, 80% to 90%, or 90% to 100% more butyrate than unmodified bacteria of the same bacterial subtype under the same conditions. In yet another embodiment, the genetically engineered bacteria produce 1.0-1.2-fold, 1.2-1.4-fold, 1.4-1.6-fold, 1.6-1.8-fold, 1.8-2-fold, or two-fold more butyrate than unmodified bacteria of the same bacterial subtype under the same conditions. In yet another embodiment, the the genetically engineered bacteria produce three-fold, four-fold, five-fold, six-fold, seven-fold, eight-fold, nine-fold, ten-fold, fifteen-fold, twenty-fold, thirty-fold, forty-fold, or fifty-fold, more butyrate than unmodified bacteria of the same bacterial subtype under the same conditions.

[0269] In certain situations, the need may arise to prevent and/or reduce acetate production of an engineered or naturally occurring strain, e.g., E. coli Nissle, while maintaining high levels of butyrate production. Without wishing to be bound by theory, one or more mutations and/or deletions in one or more gene(s) encoding in one or more enzymes which function in the acetate producing metabolic arm of fermentation should reduce and/or prevent production of acetate. A non-limiting example of such an enzyme is phosphate acetyltransferase (Pta), which is the first enzyme in the metabolic arm converting acetyl-CoA to acetate. Deletion and/or mutation of the Pta gene or a gene encoding another enzyme in this metabolic arm may also allow for more acetyl-CoA to be used for butyrate production. Additionally, one or more mutations preventing or reducing the flow through other metabolic arms of mixed acid fermentation, such as those which produce succinate, lactate, and/or ethanol can increase the production of acetyl-CoA, which is available for butyrate synthesis. Such mutations and/or deletions, include but are not limited to mutations and/or deletions in the frdA, ldhA, and/or adhE genes.

[0270] In some embodiments, the genetically engineered bacteria comprise one or more gene sequence(s) encoding one or more enzymes for the production of butyrate and further comprise a mutation and/or deletion in the endogenous pta gene. In some embodiments, the genetically engineered bacteria comprise one or more gene sequence(s) encoding one or more enzymes for the production of butyrate and further comprise a mutation and/or deletion in the endogenous pta gene and in one or more endogenous genes selected from in the ldhA gene, the frdA gene and the adhE gene. In some embodiments, the genetically engineered bacteria comprise one or more gene sequence(s) encoding one or more enzymes for the production of butyrate and further comprise a mutation in the endogenous pta and adhE genes. In some embodiments, the genetically engineered bacteria comprise one or more gene sequence(s) encoding one or more enzymes for the production of butyrate and further comprise a mutation in the endogenous pta and ldhA genes. In some embodiments, the genetically engineered bacteria comprise one or more gene sequence(s) encoding one or more enzymes for the production of butyrate and further comprise a mutation in the endogenous pta and frdA genes. In some embodiments, the genetically engineered bacteria comprise one or more gene sequence(s) encoding one or more enzymes for the production of butyrate and further comprise a mutation and/or deletion in the endogenous pta, ldhA and frdA genes. In some embodiments, the genetically engineered bacteria comprise one or more gene sequence(s) encoding one or more enzymes for the production of butyrate and further comprise a mutation in the endogenous pta, ldhA, and adhE genes. In some embodiments, the genetically engineered bacteria comprise one or more gene sequence(s) encoding one or more enzymes for the production of butyrate and further comprise a mutation in the endogenous pta, frdA and adhE genes. In some embodiments, the genetically engineered bacteria comprise one or more gene sequence(s) encoding one or more enzyme(s) for the production of butyrate and further comprise a mutation and/or deletion in the endogenous pta, ldhA, frdA, and adhE genes.

[0271] In some embodiments, the genetically engineered bacteria comprise one or more gene sequence(s) selected from ter, thiA1, hbd, crt2, pbt, and/or buk and further comprise a mutation and/or deletion in the endogenous pta gene. In some embodiments, the genetically engineered bacteria comprise one or more gene sequence(s) comprising one or more ter-thiA1-hbd-crt2-pbt-buk butyrate cassette(s) and further comprise a mutation and/or deletion in the endogenous pta gene. In some embodiments, the genetically engineered bacteria comprise one or more gene sequence(s) selected from ter, thiA1, hbd, crt2, pbt, and/or buk and further comprise a mutation and/or deletion in the endogenous pta gene and in one or more endogenous genes selected from in the ldhA gene, the frdA gene and the adhE gene. In some embodiments, the genetically engineered bacteria comprise one or more gene sequence(s) comprising one or more ter-thiA1-hbd-crt2-pbt-buk butyrate cassette(s) and further comprise a mutation and/or deletion in the endogenous pta gene and in one or more endogenous genes selected from in the ldhA gene, the frdA gene and the adhE gene. In some embodiments, the genetically engineered bacteria comprise one or more gene sequence(s) selected from ter, thiA1, hbd, crt2, pbt, and/or buk and further comprise a mutation in the endogenous pta and adhE genes. In some embodiments, the genetically engineered bacteria comprise one or more gene sequence(s) comprising one or more ter-thiA1-hbd-crt2-pbt-buk butyrate cassette(s) and further comprise a mutation in the endogenous pta and adhE genes. In some embodiments, the genetically engineered bacteria comprise one or more gene sequence(s) selected from ter, thiA1, hbd, crt2, pbt, and/or buk and further comprise a mutation in the endogenous pta and ldhA genes.

[0272] In some embodiments, the genetically engineered bacteria comprise one or more gene sequence(s) comprising one or more ter-thiA1-hbd-crt2-pbt-buk butyrate cassette(s) and further comprise a mutation in the endogenous pta and ldhA genes. In some embodiments, the genetically engineered bacteria comprise one or more gene sequence(s) selected from ter, thiA1, hbd, crt2, pbt, and/or buk and further comprise a mutation in the endogenous pta and frdA genes. In some embodiments, the genetically engineered bacteria comprise one or more gene sequence(s) comprising one or more ter-thiA1-hbd-crt2-pbt-buk butyrate cassette(s) and further comprise a mutation in the endogenous pta and frdA genes. In some embodiments, the genetically engineered bacteria comprise one or more gene sequence(s) selected from ter, thiA1, hbd, crt2, pbt, and/or buk and further comprise a mutation and/or deletion in the endogenous pta, ldhA and frdA genes. In some embodiments, the genetically engineered bacteria comprise one or more gene sequence(s) comprising one or more ter-thiA1-hbd-crt2-pbt-buk butyrate cassette(s) and further comprise a mutation and/or deletion in the endogenous pta, ldhA and frdA genes. In some embodiments, the genetically engineered bacteria comprise one or more gene sequence(s) selected from ter, thiA1, hbd, crt2, pbt, and/or buk and further comprise a mutation in the endogenous pta, ldhA, and adhE genes. In some embodiments, the genetically engineered bacteria comprise one or more gene sequence(s) comprising one or more ter-thiA1-hbd-crt2-pbt-buk butyrate cassette(s) and further comprise a mutation in the endogenous pta, ldhA, and adhE genes. In some embodiments, the genetically engineered bacteria comprise one or more gene sequence(s) selected from ter, thiA1, hbd, crt2, pbt, and/or buk and further comprise a mutation in the endogenous pta, frdA and adhE genes. In some embodiments, the genetically engineered bacteria comprise one or more gene sequence(s) comprising one or more ter-thiA1-hbd-crt2-pbt-buk butyrate cassette(s) and further comprise a mutation in the endogenous pta, frdA and adhE genes. In some embodiments, the genetically engineered bacteria comprise one or more gene sequence(s) selected from ter, thiA1, hbd, crt2, pbt, and/or buk and further comprise a mutation in the endogenous pta, ldhA, frdA, and adhE genes. In some embodiments, the genetically engineered bacteria comprise one or more gene sequence(s) comprising one or more ter-thiA1-hbd-crt2-pbt-buk butyrate cassette(s) and further comprise a mutation in the endogenous pta, ldhA, frdA, and adhE genes.

[0273] In some embodiments, the genetically engineered bacteria comprise one or more gene sequence(s) selected from ter, thiA1, hbd, crt2, tesB and further comprise a mutation and/or deletion in the endogenous pta gene. In some embodiments, the genetically engineered bacteria comprise one or more gene sequence(s) comprising one or more ter-thiA1-hbd-crt2-tesB butyrate cassette(s) and further comprise a mutation and/or deletion in the endogenous pta gene. In some embodiments, the genetically engineered bacteria comprise one or more gene sequence(s) selected from ter, thiA1, hbd, crt2, tesB and further comprise a mutation and/or deletion in the endogenous pta gene and in one or more endogenous genes selected from in the ldhA gene, the frdA gene and the adhE gene. In some embodiments, the genetically engineered bacteria comprise one or more gene sequence(s) comprising one or more ter-thiA1-hbd-crt2-tesB butyrate cassette(s) and further comprise a mutation and/or deletion in the endogenous pta gene and in one or more endogenous genes selected from in the ldhA gene, the frdA gene and the adhE gene. In some embodiments, the genetically engineered bacteria comprise one or more gene sequence(s) selected from ter, thiA1, hbd, crt2, tesB and further comprise a mutation in the endogenous pta and adhE genes. In some embodiments, the genetically engineered bacteria comprise one or more gene sequence(s) comprising one or more ter-thiA1-hbd-crt2-tesB butyrate cassette(s) and further comprise a mutation in the endogenous pta and adhE genes. In some embodiments, the genetically engineered bacteria comprise one or more gene sequence(s) selected from ter, thiA1, hbd, crt2, tesB and further comprise a mutation in the endogenous pta and ldhA genes.

[0274] In some embodiments, the genetically engineered bacteria comprise one or more gene sequence(s) comprising one or more ter-thiA1-hbd-crt2-tesB butyrate cassette(s) and further comprise a mutation in the endogenous pta and ldhA genes. In some embodiments, the genetically engineered bacteria comprise one or more gene sequence(s) selected from ter, thiA1, hbd, crt2, tesB and further comprise a mutation in the endogenous pta and frdA genes. In some embodiments, the genetically engineered bacteria comprise one or more gene sequence(s) comprising one or more ter-thiA1-hbd-crt2-tesB butyrate cassette(s) and further comprise a mutation in the endogenous pta and frdA genes. In some embodiments, the genetically engineered bacteria comprise one or more gene sequence(s) selected from ter, thiA1, hbd, crt2, tesB and further comprise a mutation and/or deletion in the endogenous pta, ldhA and frdA genes. In some embodiments, the genetically engineered bacteria comprise one or more gene sequence(s) comprising one or more ter-thiA1-hbd-crt2-tesB butyrate cassette(s) and further comprise a mutation and/or deletion in the endogenous pta, ldhA and frdA genes. In some embodiments, the genetically engineered bacteria comprise one or more gene sequence(s) selected from ter, thiA1, hbd, crt2, tesB and further comprise a mutation in the endogenous pta, ldhA, and adhE genes. In some embodiments, the genetically engineered bacteria comprise one or more gene sequence(s) comprising one or more ter-thiA1-hbd-crt2-tesB butyrate cassette(s) and further comprise a mutation in the endogenous pta, ldhA, and adhE genes. In some embodiments, the genetically engineered bacteria comprise one or more gene sequence(s) selected from ter, thiA1, hbd, crt2, tesB and further comprise a mutation in the endogenous pta, frdA and adhE genes. In some embodiments, the genetically engineered bacteria comprise one or more gene sequence(s) comprising one or more ter-thiA1-hbd-crt2-tesB butyrate cassette(s) and further comprise a mutation in the endogenous pta, frdA and adhE genes. In some embodiments, the genetically engineered bacteria comprise one or more gene sequence(s) selected from ter, thiA1, hbd, crt2, tesB and further comprise a mutation in the endogenous pta, ldhA, frdA, and adhE genes. In some embodiments, the genetically engineered bacteria comprise one or more gene sequence(s) comprising one or more ter-thiA1-hbd-crt2-tesB butyrate cassette(s) and further comprise a mutation in the endogenous pta, ldhA, frdA, and adhE genes.

[0275] In some embodiments, the genetically engineered bacteria produce 0% to to 2% to 4%, 4% to 6%, 6% to 8%, 8% to 10%, 10% to 12%, 12% to 14%, 14% to 16%, 16% to 18%, 18% to 20%, 20% to 25%, 25% to 30%, 30% to 35%, 35% to 40%, 40% to 45% 45% to 50%, 50% to 55%, 55% to 60%, 60% to 65%, 65% to 70% to 80%, 80% to. 90%, or 90% to 100% less acetate than unmodified bacteria of the same bacterial subtype under the same conditions. In yet another embodiment, the genetically engineered bacteria produce 1.0-1.2-fold, 1.2-1.4-fold, 1.4-1.6-fold, 1.6-1.8-fold, 1.8-2-fold, or two-fold less acetate than unmodified bacteria of the same bacterial subtype under the same conditions. In yet another embodiment, the the genetically engineered bacteria produce three-fold, four-fold, five-fold, six-fold, seven-fold, eight-fold, nine-fold, ten-fold, fifteen-fold, twenty-fold, thirty-fold, forty-fold, or fifty-fold, less acetate than unmodified bacteria of the same bacterial subtype under the same conditions.

[0276] In some embodiments, the genetically engineered bacteria produce 0% to to 2% to 4%, 4% to 6%, 6% to 8%, 8% to 10%, 10% to 12%, 12% to 14%, 14% to 16%, 16% to 18%, 18% to 20%, 20% to 25%, 25% to 30%, 30% to 35%, 35% to 40%, 40% to 45% 45% to 50%, 50% to 55%, 55% to 60%, 60% to 65%, 65% to 70% to 80%, 80% to 90%, or 90% to 100% more butyrate than unmodified bacteria of the same bacterial subtype under the same conditions. In yet another embodiment, the genetically engineered bacteria produce 1.0-1.2-fold, 1.2-1.4-fold, 1.4-1.6-fold, 1.6-1.8-fold, 1.8-2-fold, or two-fold more butyrate than unmodified bacteria of the same bacterial subtype under the same conditions. In yet another embodiment, the the genetically engineered bacteria produce three-fold, four-fold, five-fold, six-fold, seven-fold, eight-fold, nine-fold, ten-fold, fifteen-fold, twenty-fold, thirty-fold, forty-fold, or fifty-fold, more butyrate than unmodified bacteria of the same bacterial subtype under the same conditions.

[0277] In some embodiments, the genetically engineered bacteria comprise a combination of butyrate biosynthesis genes from different species, strains, and/or substrains of bacteria, and are capable of producing butyrate. In some embodiments, one or more of the butyrate biosynthesis genes is functionally replaced, modified, and/or mutated in order to enhance stability and/or increase butyrate production. In some embodiments, the local production of butyrate reduces food intake and ameliorates improves gut barrier function and reduces inflammation. In some embodiments, the genetically engineered bacteria are capable of expressing the butyrate biosynthesis cassette and producing butyrate in low-oxygen conditions, in the presence of certain molecules or metabolites, in the presence of molecules or metabolites associated with inflammation or an inflammatory response, or in the presence of some other metabolite that may or may not be present in the gut, such as arabinose.

[0278] In one embodiment, the butyrate gene cassette is directly operably linked to a first promoter. In another embodiment, the butyrate gene cassette is indirectly operably linked to a first promoter. In one embodiment, the promoter is not operably linked with the butyrate gene cassette in nature.

[0279] In some embodiments, the butyrate gene cassette is expressed under the control of a constitutive promoter. In another embodiment, the butyrate gene cassette is expressed under the control of an inducible promoter. In some embodiments, the butyrate gene cassette is expressed under the control of a promoter that is directly or indirectly induced by exogenous environmental conditions. In one embodiment, the butyrate gene cassette is expressed under the control of a promoter that is directly or indirectly induced by low-oxygen or anaerobic conditions, wherein expression of the butyrate gene cassette is activated under low-oxygen or anaerobic environments, such as the environment of the mammalian gut. Inducible promoters are described in more detail infra.

[0280] The butyrate gene cassette may be present on a plasmid or chromosome in the bacterial cell. In one embodiment, the butyrate gene cassette is located on a plasmid in the bacterial cell. In another embodiment, the butyrate gene cassette is located in the chromosome of the bacterial cell. In yet another embodiment, a native copy of the butyrate gene cassette is located in the chromosome of the bacterial cell, and a butyrate gene cassette from a different species of bacteria is located on a plasmid in the bacterial cell. In yet another embodiment, a native copy of the butyrate gene cassette is located on a plasmid in the bacterial cell, and a butyrate gene cassette from a different species of bacteria is located on a plasmid in the bacterial cell. In yet another embodiment, a native copy of the butyrate gene cassette is located in the chromosome of the bacterial cell, and a butyrate gene cassette from a different species of bacteria is located in the chromosome of the bacterial cell.

[0281] In some embodiments, the butyrate gene cassette is expressed on a low-copy plasmid. In some embodiments, the butyrate gene cassette is expressed on a high-copy plasmid. In some embodiments, the high-copy plasmid may be useful for increasing expression of butyrate.

[0282] Propionate

[0283] In alternate embodiments, the genetically engineered bacteria of the invention are capable of producing an anti-inflammatory or gut barrier enhancer molecule, e.g., propionate, that is synthesized by a biosynthetic pathway requiring multiple genes and/or enzymes.

[0284] In some embodiments, the genetically engineered bacteria of the invention comprise a propionate gene cassette and are capable of producing propionate under particular exogenous environmental conditions. The genetically engineered bacteria may express any suitable set of propionate biosynthesis genes (see, e.g., Table 4, Table 5, Table 6, Table 7). Unmodified bacteria that are capable of producing propionate via an endogenous propionate biosynthesis pathway include, but are not limited to, Clostridium propionicum, Megasphaera elsdenii, and Prevotella ruminicola. In some embodiments, the genetically engineered bacteria of the invention comprise propionate biosynthesis genes from a different species, strain, or substrain of bacteria. In some embodiments, the genetically engineered bacteria comprise the genes pct, lcd, and acr from Clostridium propionicum. In some embodiments, the genetically engineered bacteria comprise acrylate pathway genes for propionate biosynthesis, e.g., pct, lcdA, lcdB, lcdC, etfA, acrB, and acrC. In some embodiments, the rate limiting step catalyzed by the Acr enzyme, is replaced by the AcuI from R. sphaeroides, which catalyzes the NADPH-dependent acrylyl-CoA reduction to produce propionyl-CoA. Thus the propionate cassette comprises pct, lcdA, lcdB, lcdC, and acuI. In another embodiment, the homolog of AcuI in E. coli, yhdH is used. This the propionate cassette comprises pct, lcdA, lcdB, lcdC, and yhdH. In alternate embodiments, the genetically engineered bacteria comprise pyruvate pathway genes for propionate biosynthesis, e.g., thrA^{fbr}, thrB, thrC, ilvA^{fbr}, aceE, aceF, and lpd, and optionally further comprise tesB. In another embodiment, the propionate gene cassette comprises the genes of the Sleepting Beauty Mutase operon, e.g., from E. coli (sbm, ygfD, ygfG, ygfH. The SBM pathway is cyclical and composed of a series of biochemical conversions forming propionate as a fermentative product while regenerating the starting molecule of succinyl-CoA. Sbm converts succinyl CoA to L-methylmalonylCoA, ygfG converts L-methylmalonylCoA into PropionylCoA, and ygfH converts propionylCoA into propionate and succinate into succinylCoA.

[0285] This pathway is very similar to the oxidative propionate pathway of Propionibacteria, which also converts succinate to propionate. Succinyl-CoA is converted to R-methylmalonyl-CoA by methymalonyl-CoA mutase (mutAB). This is in turn converted to S-methylmalonyl-CoA via methymalonyl-CoA epimerase (GI: 18042134). There are three genes which encode methylmalonyl-CoA carboxytransferase (mmdA, PFREUD_18870, bccp) which converts methylmalonyl-CoA to propionyl-CoA.

[0286] The genes may be codon-optimized, and translational and transcriptional elements may be added. Table 4-6 lists the nucleic acid sequences of exemplary genes in the propionate biosynthesis gene cassette. Table 7 lists the polypeptide sequences expressed by exemplary propionate biosynthesis genes.

TABLE 4
Propionate Cassette Sequences (Acrylate Pathway)

| Gene sequence | Description |
|---|---|
| pct SEQ ID NO: 21 | ATGCGCAAAGTGCCGATTATCACGGCTGACGAGGCCGCAAAAC |
| | TGATCAAGGACGGCGACACCGTGACAACTAGCGGCTTTGTGGGT |
| | AACGCGATCCCTGAGGCCCTTGACCGTGCAGTCGAAAAGCGTTT |
| | CCTGGAAACGGGCGAACCGAAGAACATTACTTATGTATATTGCG |
| | GCAGTCAGGGCAATCGCGACGGTCGTGGCGCAGAACATTTCGC |
| | GCATGAAGGCCTGCTGAAACGTTATATCGCTGGCCATTGGGCGA |
| | CCGTCCCGGCGTTAGGGAAAATGGCCATGGAGAATAAAATGGA |
| | GGCCTACAATGTCTCTCAGGGCGCCTTGTGTCATCTCTTTCGCGA |
| | TATTGCGAGCCATAAACCGGGTGTGTTCACGAAAGTAGGAATCG |
| | GCACCTTCATTGATCCACGTAACGGTGGTGGGAAGGTCAACGAT |
| | ATTACCAAGGAAGATATCGTAGAACTGGTGGAAATTAAAGGGC |
| | AGGAATACCTGTTTTATCCGGCGTTCCCGATCCATGTCGCGCTG |
| | ATTCGTGGCACCTATGCGGACGAGAGTGGTAACATCACCTTTGA |
| | AAAAGAGGTAGCGCCTTTGGAAGGGACTTCTGTCTGTCAAGCGG |
| | TGAAGAACTCGGGTGGCATTGTCGTGGTTCAGGTTGAGCGTGTC |
| | GTCAAAGCAGGCACGCTGGATCCGCGCCATGTGAAAGTTCCGG |
| | GTATCTATGTAGATTACGTAGTCGTCGCGGATCCGGAGGACCAT |
| | CAACAGTCCCTTGACTGCGAATATGATCCTGCCCTTAGTGGAGA |
| | GCACCGTCGTCCGGAGGTGGTGGGTGAACCACTGCCTTTATCCG |
| | CGAAGAAAGTCATCGGCCGCCGTGGCGCGATTGAGCTCGAGAA |
| | AGACGTTGCAGTGAACCTTGGGGTAGGTGCACCTGAGTATGTGG |
| | CCTCCGTGGCCGATGAAGAAGGCATTGTGGATTTTATGACTCTC |
| | ACAGCGGAGTCCGGCGCTATCGGTGGCGTTCCAGCCGGCGGTGT |
| | TCGCTTTGGGGCGAGCTACAATGCTGACGCCTTGATCGACCAGG |
| | GCTACCAATTTGATTATTACGACGGTGGGGGTCTGGATCTTTGTT |
| | ACCTGGGTTTAGCTGAATGCGACGAAAAGGGTAATATCAATGTT |
| | AGCCGCTTCGGTCCTCGTATCGCTGGGTGCGGCGGATTCATTAA |
| | CATTACCCAAAACACGCCGAAAGTCTTCTTTTGTGGGACCTTTA |
| | CAGCCGGGGGGCTGAAAGTGAAAATTGAAGATGGTAAGGTGAT |
| | TATCGTTCAGGAAGGGAAACAGAAGAAATTCCTTAAGGCAGTG |
| | GAGCAAATCACCTTTAATGGAGACGTGGCCTTAGCGAACAAGC |
| | AACAAGTTACCTACATCACGGAGCGTTGCGTCTTCCTCCTCAAA |
| | GAAGACGGTTTACACCTTTCGGAAATCGCGCCAGGCATCGATCT |
| | GCAGACCCAGATTTTGGATGTTATGGACTTTGCCCCGATCATTG |
| | ATCGTGACGCAAACGGGCAGATTAAACTGATGGACGCGGCGTT |
| | ATTCGCAGAAGGGCTGATGGGCTTGAAAGAAATGAAGTCTTAA |
| lcdA SEQ ID NO: 22 | ATGAGCTTAACCCAAGGCATGAAAGCTAAACAACTGTTAGCAT |
| | ACTTTCAGGGTAAAGCCGATCAGGATGCACGTGAAGCGAAAGC |
| | CCGCGGTGAGCTGGTCTGCTGGTCGGCGTCAGTCGCGCCGCCGG |
| | AATTTTGCGTAACAATGGGCATTGCCATGATCTACCCGGAGACT |
| | CATGCAGCGGGCATCGGTGCCCGCAAAGGTGCGATGGACATGC |
| | TGGAAGTTGCGGACCGCAAAGGCTACAACGTGGATTGTTGTTCC |
| | TACGGCCGTGTAAATATGGGTTACATGGAATGTTTAAAAGAAGC |
| | CGCCATCACGGGCGTCAAGCCGGAAGTTTTGGTTAATTCCCCTG |
| | CTGCTGACGTTCCGCTTCCCGATTTGGTGATTACGTGTAATAATA |
| | TCTGTAACACGCTGCTGAAATGGTACGAAAACTTAGCAGCAGA |
| | ACTCGATATTCCTTGCATCGTGATCGACGTACCGTTTAATCATAC |
| | CATGCCGATTCCGGAATATGCCAAGGCCTACATCGCGGACCAGT |
| | TCCGCAATGCAATTTCTCAGCTGGAAGTTATTTGTGGCCGTCCGT |
| | TCGATTGGAAGAAATTTAAGGAGGTCAAAGATCAGACCCAGCG |
| | TAGCGTATACCACTGGAACCGCATTGCCGAGATGGCGAAATAC |
| | AAGCCTAGCCCGCTGAACGGCTTCGATCTGTTCAATTACATGGC |
| | GTTAATCGTGGCGTGCCGCAGCCTGGATTATGCAGAAATTACCT |
| | TTAAAGCGTTCGCGGACGAATTAGAAGAGAATTTGAAGGCGGG |
| | TATCTACGCCTTTAAAGGTGCGGAAAAAACGCGCTTTCAATGGG |
| | AAGGTATCGCGGTGTGGCCACATTTAGGTCACACGTTTAAATCT |
| | ATGAAGAATCTGAATTCGATTATGACCGGTACGGCATACCCCGC |
| | CCTTTGGGACCTGCACTATGACGCTAACGACGAATCTATGCACT |
| | CTATGGCTGAAGCGTACACCCGTATTTATATTAATACTTGTCTGC |
| | AGAACAAAGTAGAGGTCCTGCTTGGGATCATGGAAAAAGGCCA |
| | GGTGGATGGTACCGTATATCATCTGAATCGCAGCTGCAAACTGA |
| | TGAGTTTCCTGAACGTGGAAACGGCTGAAATTATTAAAGAGAA |
| | GAACGGTCTTCCTTACGTCTCCATTGATGGCGATCAGACCGATC |
| | CTCGCGTTTTTTCTCCGGCCCAGTTTGATACCCGTGTTCAGGCCC |
| | TGGTTGAGATGATGGAGGCCAATATGGCGGCAGCGGAATAA |
| lcdB SEQ ID NO: 23 | ATGTCACGCGTGGAGGCAATCCTGTCGCAGCTGAAAGATGTCGC |
| | CGCGAATCCGAAAAAAGCCATGGATGACTATAAAGCTGAAACA |
| | GGTAAGGGCGCGGTTGGTATCATGCCGATCTACAGCCCCGAAG |
| | AAATGGTACACGCCGCTGGCTATTTGCCGATGGGAATCTGGGGC |
| | GCCCAGGGCAAAACGATTAGTAAAGCGCGCACCTATCTGCCTGC |
| | TTTTGCCTGCAGCGTAATGCAGCAGGTTATGGAATTACAGTGCG |
| | AGGGCGCGTATGATGACCTGTCCGCAGTTATTTTTAGCGTACCG |
| | TGCGACACTCTCAAATGTCTTAGCCAGAAATGGAAAGGTACGTC |
| | CCCAGTGATTGTATTTACGCATCCGCAGAACCGCGGATTAGAAG |
| | CGGCGAACCAATTCTTGGTTACCGAGTATGAACTGGTAAAAGCA |
| | CAACTGGAATCAGTTCTGGGTGTGAAAATTTCAAACGCCGCCCT |
| | GGAAAATTCGATTGCAATTTATAACGAGAATCGTGCCGTGATGC |
| | GTGAGTTCGTGAAAGTGGCAGCGGACTATCCTCAAGTCATTGAC |
| | GCAGTGAGCCGCCACGCGGTTTTTAAAGCGCGCCAGTTTATGCT |
| | TAAGGAAAAACATACCGCACTTGTGAAAGAACTGATCGCTGAG |
| | ATTAAAGCAACGCCAGTCCAGCCGTGGGACGGAAAAAAGGTTG |
| | TAGTGACGGGCATTCTGTTGGAACCGAATGAGTTATTAGATATC |
| | TTTAATGAGTTTAAGATCGCGATTGTTGATGATGATTTAGCGCA |
| | GGAAAGCCGTCAGATCCGTGTTGACGTTCTGGACGGAGAAGGC |
| | GGACCGCTCTACCGTATGGCTAAAGCGTGGCAGCAAATGTATGG |
| | CTGCTCGCTGGCAACCGACACCAAGAAGGGTCGCGGCCGTATGT |
| | TAATTAACAAAACGATTCAGACCGGTGCGGACGCTATCGTAGTT |
| | GCAATGATGAAGTTTTGCGACCCAGAAGAATGGGATTATCCGGT |
| | AATGTACCGTGAATTTGAAGAAAAAGGGGTCAAATCACTTATG |
| | ATTGAGGTGGATCAGGAAGTATCGTCTTTCGAACAGATTAAAAC |
| | CCGTCTGCAGTCATTCGTCGAAATGCTTTAA |
| lcdC SEQ ID NO: 24 | ATGTATACCTTGGGGATTGATGTCGGTTCTGCCTCTAGTAAAGC |
| | GGTGATTCTGAAAGATGGAAAAGATATTGTCGCTGCCGAGGTTG |
| | TCCAAGTCGGTACCGGCTCCTCGGGTCCCCAACGCGCACTGGAC |
| | AAAGCCTTTGAAGTCTCTGGCTTAAAAAAGGAAGACATCAGCTA |
| | CACAGTAGCTACGGGCTATGGGCGCTTCAATTTTAGCGACGCGG |
| | ATAAACAGATTTCGGAAATTAGCTGTCATGCCAAAGGCATTTAT |
| | TTCTTAGTACCAACTGCGCGCACTATTATTGACATTGGCGGCCA |
| | AGATGCGAAAGCCATCCGCCTGGACGACAAGGGGGGTATTAAG |
| | CAATTCTTCATGAATGATAAATGCGCGGCGGGCACGGGGCGTTT |
| | CCTGGAAGTCATGGCTCGCGTACTTGAAACCACCCTGGATGAAA |
| | TGGCTGAACTGGATGAACAGGCGACTGACACCGCTCCCATTTCA |
| | AGCACCTGCACGGTTTTCGCCGAAAGCGAAGTAATTAGCCAATT |
| | GAGCAATGGTGTCTCACGCAACAACATCATTAAAGGTGTCCATC |
| | TGAGCGTTGCGTCACGTGCGTGTGGTCTGGCGTATCGCGGCGGT |
| | TTGGAGAAAGATGTTGTTATGACAGGTGGCGTGGCAAAAAATG |
| | CAGGGGTGGTGCGCGCGGTGGCGGGCGTTCTGAAGACCGATGT |
| | TATCGTTGCTCCGAATCCTCAGACGACCGGTGCACTGGGGGCAG |
| | CGCTGTATGCTTATGAGGCCGCCCAGAAGAAGTA |
| etfA SEQ ID NO: 25 | ATGGCCTTCAATAGCGCAGATATTAATTCTTTCCGCGATATTTGG |
| | GTGTTTTGTGAACAGCGTGAGGGCAAACTGATTAACACCGATTT |
| | CGAATTAATTAGCGAAGGTCGTAAACTGGCTGACGAACGCGGA |
| | AGCAAACTGGTTGGAATTTTGCTGGGGCACGAAGTTGAAGAAA |
| | TCGCAAAAGAATTAGGCGGCTATGGTGCGGACAAGGTAATTGT |
| | GTGCGATCATCCGGAACTTAAATTTTACACTACGGATGCTTATG |
| | CCAAAGTTTTATGTGACGTCGTGATGGAAGAGAAACCGGAGGT |
| | AATTTTGATCGGTGCCACCAACATTGGCCGTGATCTCGGACCGC |
| | GTTGTGCTGCACGCTTGCACACGGGGCTGACGGCTGATTGCACG |
| | CACCTGGATATTGATATGAATAAATATGTGGACTTTCTTAGCAC |
| | CAGTAGCACCTTGGATATCTCGTCGATGACTTTCCCTATGGAAG |
| | ATACAAACCTTAAAATGACGCGCCCTGCATTTGGCGGACATCTG |
| | ATGGCAACGATCATTTGTCCACGCTTCCGTCCCTGTATGAGCAC |
| | AGTGCGCCCCGGAGTGATGAAGAAAGCGGAGTTCTCGCAGGAG |
| | ATGGCGCAAGCATGTCAAGTAGTGACCCGTCACGTAAATTTGTC |
| | GGATGAAGACCTTAAAACTAAAGTAATTAATATCGTGAAGGAA |
| | ACGAAAAAGATTGTGGATCTGATCGGCGCAGAAATTATTGTGTC |
| | AGTTGGTCGTGGTATCTCGAAAGATGTCCAAGGTGGAATTGCAC |
| | TGGCTGAAAAACTTGCGGACGCATTTGGTAACGGTGTCGTGGGC |
| | GGCTCGCGCGCAGTGATTGATTCCGGCTGGTTACCTGCGGATCA |
| | TCAGGTTGGACAAACCGGTAAGACCGTGCACCCGAAAGTCTAC |
| | GTGGCGCTGGGTATTAGTGGGGCTATCCAGCATAAGGCTGGGAT |
| | GCAAGACTCTGAACTGATCATTGCCGTCAACAAAGACGAAACG |
| | GCGCCTATCTTCGACTGCGCCGATTATGGCATCACCGGTGATTT |
| | ATTTAAAATCGTACCGATGATGATCGACGCGATCAAAGAGGGT |
| | AAAAACGCATGA |
| acrB SEQ ID NO: 26 | ATGCGCATCTATGTGTGTGTGAAACAAGTCCCAGATACGAGCGG |
| | CAAGGTGGCCGTTAACCCTGATGGGACCCTTAACCGTGCCTCAA |
| | TGGCAGCGATTATTAACCCGGACGATATGTCCGCGATCGAACAG |
| | GCATTAAAACTGAAAGATGAAACCGGATGCCAGGTTACGGCGC |
| | TTACGATGGGTCCTCCTCCTGCCGAGGGCATGTTGCGCGAAATT |
| | ATTGCAATGGGGGCCGACGATGGTGTGCTGATTTCGGCCCGTGA |
| | ATTTGGGGGGTCCGATACCTTCGCAACCAGTCAAATTATTAGCG |
| | CGGCAATCCATAAATTAGGCTTAAGCAATGAAGACATGATCTTT |
| | TGCGGTCGTCAGGCCATTGACGGTGATACGGCCCAAGTCGGCCC |
| | TCAAATTGCCGAAAAACTGAGCATCCCACAGGTAACCTATGGCG |
| | CAGGAATCAAAAAATCTGGTGATTTAGTGCTGGTGAAGCGTATG |
| | TTGGAGGATGGTTATATGATGATCGAAGTCGAAACTCCATGTCT |
| | GATTACCTGCATTCAGGATAAAGCGGTAAAACCACGTTACATGA |
| | CTCTCAACGGTATTATGGAATGCTACTCCAAGCCGCTCCTCGTTC |
| | TCGATTACGAAGCACTGAAAGATGAACCGCTGATCGAACTTGAT |
| | ACCATTGGGCTTAAAGGCTCCCCGACGAATATCTTTAAATCGTT |
| | TACGCCGCCTCAGAAAGGCGTTGGTGTCATGCTCCAAGGCACCG |
| | ATAAGGAAAAAGTCGAGGATCTGGTGGATAAGCTGATGCAGAA |
| | ACATGTCATCTAA |
| acrC SEQ ID NO: 27 | ATGTTCTTACTGAAGATTAAAAAAGAACGTATGAAACGCATGG |
| | ACTTTAGTTTAACGCGTGAACAGGAGATGTTAAAAAAACTGGCG |
| | CGTCAGTTTGCTGAGATCGAGCTGGAACCGGTGGCCGAAGAGA |
| | TTGATCGTGAGCACGTTTTTCCTGCAGAAAACTTTAAGAAGATG |
| | GCGGAAATTGGCTTAACCGGCATTGGTATCCCGAAAGAATTTGG |
| | TGGCTCCGGTGGAGGCACCCTGGAGAAGGTCATTGCCGTGTCAG |
| | AATTCGGCAAAAAGTGTATGGCCTCAGCTTCCATTTTAAGCATT |
| | CATCTTATCGCGCCGCAGGCAATCTACAAATATGGGACCAAAGA |
| | ACAGAAAGAGACGTACCTGCCGCGTCTTACCAAAGGTGGTGAA |
| | CTGGGCGCCTTTGCGCTGACAGAACCAAACGCCGGAAGCGATG |
| | CCGGCGCGGTAAAAACGACCGCGATTCTGGACAGCCAGACAAA |
| | CGAGTACGTGCTGAATGGCACCAAATGCTTTATCAGCGGGGGCG |
| | GGCGCGCGGGTGTTCTTGTAATTTTTGCGCTTACTGAACCGAAA |
| | AAAGGTCTGAAAGGGATGAGCGCGATTATCGTGGAGAAAGGGA |
| | CCCCGGGCTTCAGCATCGGCAAGGTGGAGAGCAAGATGGGGAT |
| | CGCAGGTTCGGAAACCGCGGAACTTATCTTCGAAGATTGTCGCG |
| | TTCCGGCTGCCAACCTTTTAGGTAAAGAAGGCAAAGGCTTTAAA |
| | ATTGCTATGGAAGCCCTGGATGGCGCCCGTATTGGCGTGGGCGC |
| | TCAAGCAATCGGAATTGCCGAGGGGGCGATCGACCTGAGTGTG |
| | AAGTACGTTCACGAGCGCATTCAATTTGGTAAACCGATCGCGAA |
| | TCTGCAGGGAATTCAATGGTATATCGCGGATATGGCGACCAAAA |
| | CCGCCGCGGCACGCGCACTTGTTGAGTTTGCAGCGTATCTTGAA |
| | GACGCGGGTAAACCGTTCACAAAGGAATCTGCTATGTGCAAGCT |
| | GAACGCCTCCGAAAACGCGCGTTTTGTGACAAATTTAGCTCTGC |
| | AGATTCACGGGGGTTACGGTTATATGAAAGATTATCCGTTAGAG |
| | CGTATGTATCGCGATGCTAAGATTACGGAAATTTACGAGGGGAC |
| | ATCAGAAATCCATAAGGTGGTGATTGCGCGTGAAGTAATGAAA |
| | CGCTAA |
| thrA^{fbr} SEQ ID NO: 28 | ATGCGAGTGTTGAAGTTCGGCGGTACATCAGTGGCAAATGCAG |
| | AACGTTTTCTGCGTGTTGCCGATATTCTGGAAAGCAATGCCAGG |
| | CAGGGGCAGGTGGCCACCGTCCTCTCTGCCCCCGCCAAAATCAC |
| | CAACCACCTGGTGGCGATGATTGAAAAAACCATTAGCGGCCAG |
| | GATGCTTTACCCAATATCAGCGATGCCGAACGTATTTGCCGA |
| | ACTTTTGACGGGACTCGCCGCCGCCCAGCCGGGGTTCCCGCTGG |
| | CGCAATTGAAAACTTTCGTCGATCAGGAATTTGCCCAAATAAAA |
| | CATGTCCTGCATGGCATTAGTTTGTTGGGGCAGTGCCCGGATAG |
| | CATCAACGCTGCGCTGATTTGCCGTGGCGAGAAAATGTCGATCG |
| | CCATTATGGCCGGCGTATTAGAAGCGCGCGGTCACAACGTTACT |
| | GTTATCGATCCGGTCGAAAAACTGCTGGCAGTGGGGCATTACCT |
| | CGAATCTACCGTCGATATTGCTGAGTCCACCCGCCGTATTGCGG |
| | CAAGCCGCATTCCGGCTGATCACATGGTGCTGATGGCAGGTTTC |
| | ACCGCCGGTAATGAAAAAGGCGAACTGGTGGTGCTTGGACGCA |
| | ACGGTTCCGACTACTCTGCTGCGGTGCTGGCTGCCTGTTTACGC |
| | GCCGATTGTTGCGAGATTTGGACGGACGTTGACGGGGTCTATAC |
| | CTGCGACCCGCGTCAGGTGCCCGATGCGAGGTTGTTGAAGTCGA |
| | TGTCCTACCAGGAAGCGATGGAGCTTTCCTACTTCGGCGCTAAA |
| | GTTCTTCACCCCCGCACCATTACCCCCATCGCCCAGTTCCAGATC |
| | CCTTGCCTGATTAAAAATACCGGAAATCCTCAAGCACCAGGTAC |
| | GCTCATTGGTGCCAGCCGTGATGAAGACGAATTACCGGTCAAGG |
| | GCATTTCCAATCTGAATAACATGGCAATGTTCAGCGTTTCTGGT |
| | CCGGGGATGAAAGGGATGGTCGGCATGGCGGCGCGCGTCTTTG |
| | CAGCGATGTCACGCGCCCGTATTTCCGTGGTGCTGATTACGCAA |
| | TCATCTTCCGAATACAGCATCAGTTTCTGCGTTCCACAAAGCGA |
| | CTGTGTGCGAGCTGAACGGGCAATGCAGGAAGAGTTCTACCTG |
| | GAACTGAAAGAAGGCTTACTGGAGCCGCTGGCAGTGACGGAAC |
| | GGCTGGCCATTATCTCGGTGGTAGGTGATGGTATGCGCACCTTG |
| | CGTGGGATCTCGGCGAAATTCTTTGCCGCACTGGCCCGCGCCAA |
| | TATCAACATTGTCGCCATTGCTCAGAGATCTTCTGAACGCTCAA |
| | TCTCTGTCGTGGTAAATAACGATGATGCGACCACTGGCGTGCGC |
| | GTTACTCATCAGATGCTGTTCAATACCGATCAGGTTATCGAAGT |
| | GTTTGTGATTGGCGTCGGTGGCGTTGGCGGTGCGCTGCTGGAGC |
| | AACTGAAGCGTCAGCAAAGCTGGCTGAAGAATAAACATATCGA |
| | CTTACGTGTCTGCGGTGTTGCCAACTCGAAGGCTCTGCTCACCA |
| | ATGTACATGGCCTTAATCTGGAAAACTGGCAGGAAGAACTGGC |
| | GCAAGCCAAAGAGCCGTTTAATCTCGGGCGCTTAATTCGCCTCG |
| | TGAAAGAATATCATCTGCTGAACCCGGTCATTGTTGACTGCACT |
| | TCCAGCCAGGCAGTGGCGGATCAATATGCCGACTTCCTGCGCGA |
| | AGGTTTCCACGTTGTCACGCCGAACAAAAAGGCCAACACCTCGT |
| | CGATGGATTACTACCATCAGTTGCGTTATGCGGCGGAAAAATCG |
| | CGGCGTAAATTCCTCTATGACACCAACGTTGGGGCTGGATTACC |
| | GGTTATTGAGAACCTGCAAAATCTGCTCAATGCAGGTGATGAAT |
| | TGATGAAGTTCTCCGGCATTCTTTCTGGTTCGCTTTCTTATATCTT |
| | CGGCAAGTTAGACGAAGGCATGAGTTTCTCCGAGGCGACCACG |
| | CTGGCGCGGGAAATGGGTTATACCGAACCGGACCCGCGAGATG |
| | ATCTTTCTGGTATGGATGTGGCGCGTAAACTATTGATTCTCGCTC |
| | GTGAAACGGGACGTGAACTGGAGCTGGCGGATATTGAAATTGA |
| | ACCTGTGCTGCCCGCAGAGTTTAACGCCGAGGGTGATGTTGCCG |
| | CTTTTATGGCGAATCTGTCACAACTCGACGATCTCTTTGCCGCGC |
| | GCGTGGCGAAGGCCCGTGATGAAGGAAAAGTTTTGCGCTATGTT |
| | GGCAATATTGATGAAGATGGCGTCTGCCGCGTGAAGATTGCCGA |
| | AGTGGATGGTAATGATCCGCTGTTCAAAGTGAAAAATGGCGAA |
| | AACGCCCTGGCCTTCTATAGCCACTATTATCAGCCGCTGCCGTT |
| | GGTACTGCGCGGATATGGTGCGGGCAATGACGTTACAGCTGCCG |
| | GTGTCTTTGCTGATCTGCTACGTACCCTCTCATGGAAGTTAGGA |
| | GTCTGA |
| thrB SEQ ID NO: 29 | ATGGTTAAAGTTTATGCCCCGGCTTCCAGTGCCAATATGAGCGT |
| | CGGGTTTGATGTGCTCGGGGCGGCGGTGACACCTGTTGATGGTG |
| | CATTGCTCGGAGATGTAGTCACGGTTGAGGCGGCAGAGACATTC |
| | AGTCTCAACAACCTCGGACGCTTTGCCGATAAGCTGCCGTCAGA |
| | ACCACGGGAAAATATCGTTTATCAGTGCTGGGAGCGTTTTTGCC |
| | AGGAACTGGGTAAGCAAATTCCAGTGGCGATGACCCTGGAAAA |
| | GAATATGCCGATCGGTTCGGGCTTAGGCTCCAGTGCCTGTTCGG |
| | TGGTCGCGGCGCTGATGGCGATGAATGAACACTGCGGCAAGCC |
| | GCTTAATGACACTCGTTTGCTGGCTTTGATGGGCGAGCTGGAAG |
| | GCCGTATCTCCGGCAGCATTCATTACGACAACGTGGCACCGTGT |
| | TTTCTCGGTGGTATGCAGTTGATGATCGAAGAAAACGACATCAT |
| | CAGCCAGCAAGTGCCAGGGTTTGATGAGTGGCTGTGGGTGCTGG |
| | CGTATCCGGGGATTAAAGTCTCGACGGCAGAAGCCAGGGCTATT |
| | TTACCGGCGCAGTATCGCCGCCAGGATTGCATTGCGCACGGGCG |
| | ACATCTGGCAGGCTTCATTCACGCCTGCTATTCCCGTCAGCCTG |
| | AGCTTGCCGCGAAGCTGATGAAAGATGTTATCGCTGAACCCTAC |
| | CGTGAACGGTTACTGCCAGGCTTCCGGCAGGCGCGGCAGGCGG |
| | TCGCGGAAATCGGCGCGGTAGCGAGCGGTATCTCCGGCTCCGGC |
| | CCGACCTTGTTCGCTCTGTGTGACAAGCCGGAAACCGCCCAGCG |
| | CGTTGCCGACTGGTTGGGTAAGAACTACCTGCAAAATCAGGAA |
| | GGTTTTGTTCATATTTGCCGGCTGGATACGGCGGGCGCACGAGT |
| | ACTGGAAAACTAA |
| thrC SEQ ID NO: 30 | ATGAAACTCTACAATCTGAAAGATCACAACGAGCAGGTCAGCTT |
| | TGCGCAAGCCGTAACCCAGGGGTTGGGCAAAAATCAGGGGCTG |
| | TTTTTTCCGCACGACCTGCCGGAATTCAGCCTGACTGAAATTGA |
| | TGAGATGCTGAAGCTGGATTTTGTCACCCGCAGTGCGAAGATCC |
| | TCTCGGCGTTTATTGGTGATGAAATCCCACAGGAAATCCTGGAA |
| | GAGCGCGTGCGCGCGGCGTTTGCCTTCCCGGCTCCGGTCGCCAA |
| | TGTTGAAAGCGATGTCGGTTGTCTGGAATTGTTCCACGGGCCAA |
| | CGCTGGCATTTAAAGATTTCGGCGGTCGCTTTATGGCACAAATG |
| | CTGACCCATATTGCGGGTGATAAGCCAGTGACCATTCTGACCGC |
| | GACCTCCGGTGATACCGGAGCGGCAGTGGCTCATGCTTTCTACG |
| | GTTTACCGAATGTGAAAGTGGTTATCCTCTATCCACGAGGCAAA |
| | ATCAGTCCACTGCAAGAAAAACTGTTCTGTACATTGGGCGGCAA |
| | TATCGAAACTGTTGCCATCGACGGCGATTTCGATGCCTGTCAGG |
| | CGCTGGTGAAGCAGGCGTTTGATGATGAAGAACTGAAAGTGGC |
| | GCTAGGGTTAAACTCGGCTAACTCGATTAACATCAGCCGTTTGC |
| | TGGCGCAGATTTGCTACTACTTTGAAGCTGTTGCGCAGCTGCCG |
| | CAGGAGACGCGCAACCAGCTGGTTGTCTCGGTGCCAAGCGGAA |
| | ACTTCGGCGATTTGACGGCGGGTCTGCTGGCGAAGTCACTCGGT |
| | CTGCCGGTGAAACGTTTTATTGCTGCGACCAACGTGAACGATAC |
| | CGTGCCACGTTTCCTGCACGACGGTCAGTGGTCACCCAAAGCGA |
| | CTCAGGCGACGTTATCCAACGCGATGGACGTGAGTCAGCCGAA |
| | CAACTGGCCGCGTGTGGAAGAGTTGTTCCGCCGCAAAATCTGGC |
| | AACTGAAAGAGCTGGGTTATGCAGCCGTGGATGATGAAACCAC |
| | GCAACAGACAATGCGTGAGTTAAAAGAACTGGGCTACACTTCG |
| | GAGCCGCACGCTGCCGTAGCTTATCGTGCGCTGCGTGATCAGTT |
| | GAATCCAGGCGAATATGGCTTGTTCCTCGGCACCGCGCATCCGG |
| | CGAAATTTAAAGAGAGCGTGGAAGCGATTCTCGGTGAAACGTT |
| | GGATCTGCCAAAAGAGCTGGCAGAACGTGCTGATTTACCCTTGC |
| | TTTCACATAATCTGCCCGCCGATTTTGCTGCGTTGCGTAAATTGA |
| | TGATGAATCATCAGTAA |
| ilvA^{fbr} SEQ ID NO: 31 | ATGAGTGAAACATACGTGTCTGAGAAAAGTCCAGGAGTGATGG |
| | CTAGCGGAGCGGAGCTGATTCGTGCCGCCGACATTCAAACGGC |
| | GCAGGCACGAATTTCCTCCGTCATTGCACCAACTCCATTGCAGT |
| | ATTGCCCTCGTCTTTCTGAGGAAACCGGAGCGGAAATCTACCTT |
| | AAGCGTGAGGATCTGCAGGATGTTCGTTCCTACAAGATCCGCGG |
| | TGCGCTGAACTCTGGAGCGCAGCTCACCCAAGAGCAGCGCGAT |
| | GCAGGTATCGTTGCCGCATCTGCAGGTAACCATGCCCAGGGCGT |
| | GGCCTATGTGTGCAAGTCCTTGGGCGTTCAGGGACGCATCTATG |
| | TTCCTGTGCAGACTCCAAAGCAAAAGCGTGACCGCATCATGGTT |
| | CACGGCGGAGAGTTTGTCTCCTTGGTGGTCACTGGCAATAACTT |
| | CGACGAAGCATCGGCTGCAGCGCATGAAGATGCAGAGCGCACC |
| | GGCGCAACGCTGATCGAGCCTTTCGATGCTCGCAACACCGTCAT |
| | CGGTCAGGGCACCGTGGCTGCTGAGATCTTGTCGCAGCTGACTT |
| | CCATGGGCAAGAGTGCAGATCACGTGATGGTTCCAGTCGGCGGT |
| | GGCGGACTTCTTGCAGGTGTGGTCAGCTACATGGCTGATATGGC |
| | ACCTCGCACTGCGATCGTTGGTATCGAACCAGCGGGAGCAGCAT |
| | CCATGCAGGCTGCATTGCACAATGGTGGACCAATCACTTTGGAG |
| | ACTGTTGATCCCTTTGTGGACGGCGCAGCAGTCAAACGTGTCGG |
| | AGATCTCAACTACACCATCGTGGAGAAGAACCAGGGTCGCGTG |
| | CACATGATGAGCGCGACCGAGGGCGCTGTGTGTACTGAGATGCT |
| | CGATCTTTACCAAAACGAAGGCATCATCGCGGAGCCTGCTGGCG |
| | CGCTGTCTATCGCTGGGTTGAAGGAAATGTCCTTTGCACCTGGT |
| | TCTGCAGTGGTGTGCATCATCTCTGGTGGCAACAACGATGTGCT |
| | GCGTTATGCGGAAATCGCTGAGCGCTCCTTGGTGCACCGCGGTT |
| | TGAAGCACTACTTCTTGGTGAACTTCCCGCAAAAGCCTGGTCAG |
| | TTGCGTCACTTCCTGGAAGATATCCTGGGACCGGATGATGACAT |
| | CACGCTGTTTGAGTACCTCAAGCGCAACAACCGTGAGACCGGTA |
| | CTGCGTTGGTGGGTATTCACTTGAGTGAAGCATCAGGATTGGAT |
| | TCTTTGCTGGAACGTATGGAGGAATCGGCAATTGATTCCCGTCG |
| | CCTCGAGCCGGGCACCCCTGAGTACGAATACTTGACCTAA |
| aceE SEQ ID NO: 32 | ATGTCAGAACGTTTCCCAAATGACGTGGATCCGATCGAAACTCG |
| | CGACTGGCTCCAGGCGATCGAATCGGTCATCCGTGAAGAAGGT |
| | GTTGAGCGTGCTCAGTATCTGATCGACCAACTGCTTGCTGAAGC |
| | CCGCAAAGGCGGTGTAAACGTAGCCGCAGGCACAGGTATCAGC |
| | AACTACATCAACACCATCCCCGTTGAAGAACAACCGGAGTATCC |
| | GGGTAATCTGGAACTGGAACGCCGTATTCGTTCAGCTATCCGCT |
| | GGAACGCCATCATGACGGTGCTGCGTGCGTCGAAAAAAGACCT |
| | CGAACTGGGCGGCCATATGGCGTCCTTCCAGTCTTCCGCAACCA |
| | TTTATGATGTGTGCTTTAACCACTTCTTCCGTGCACGCAACGAGC |
| | AGGATGGCGGCGACCTGGTTTACTTCCAGGGCCACATCTCCCCG |
| | GGCGTGTACGCTCGTGCTTTCCTGGAAGGTCGTCTGACTCAGGA |
| | GCAGCTGGATAACTTCCGTCAGGAAGTTCACGGCAATGGCCTCT |
| | CTTCCTATCCGCACCCGAAACTGATGCCGGAATTCTGGCAGTTC |
| | CCGACCGTATCTATGGGTCTGGGTCCGATTGGTGCTATTTACCA |
| | GGCTAAATTCCTGAAATATCTGGAACACCGTGGCCTGAAAGATA |
| | CCTCTAAACAAACCGTTTACGCGTTCCTCGGTGACGGTGAAATG |
| | GACGAACCGGAATCCAAAGGTGCGATCACCATCGCTACCCGTG |
| | AAAAACTGGATAACCTGGTCTTCGTTATCAACTGTAACCTGCAG |
| | CGTCTTGACGGCCCGGTCACCGGTAACGGCAAGATCATCAACGA |
| | ACTGGAAGGCATCTTCGAAGGTGCTGGCTGGAACGTGATCAAA |
| | GTGATGTGGGGTAGCCGTTGGGATGAACTGCTGCGTAAGGATAC |
| | CAGCGGTAAACTGATCCAGCTGATGAACGAAACCGTTGACGGC |
| | GACTACCAGACCTTCAAATCGAAAGATGGTGCGTACGTTCGTGA |
| | ACACTTCTTCGGTAAATATCCTGAAACCGCAGCACTGGTTGCAG |
| | ACTGGACTGACGAGCAGATCTGGGCACTGAACCGTGGTGGTCA |
| | CGATCCGAAGAAAATCTACGCTGCATTCAAGAAAGCGCAGGAA |
| | ACCAAAGGCAAAGCGACAGTAATCCTTGCTCATACCATTAAAG |
| | GTTACGGCATGGGCGACGCGGCTGAAGGTAAAAACATCGCGCA |
| | CCAGGTTAAGAAAATGAACATGGACGGTGTGCGTCATATCCGC |
| | GACCGTTTCAATGTGCCGGTGTCTGATGCAGATATCGAAAAACT |
| | GCCGTACATCACCTTCCCGGAAGGTTCTGAAGAGCATACCTATC |
| | TGCACGCTCAGCGTCAGAAACTGCACGGTTATCTGCCAAGCCGT |
| | CAGCCGAACTTCACCGAGAAGCTTGAGCTGCCGAGCCTGCAAG |
| | ACTTCGGCGCGCTGTTGGAAGAGCAGAGCAAAGAGATCTCTAC |
| | CACTATCGCTTTCGTTCGTGCTCTGAACGTGATGCTGAAGAACA |
| | AGTCGATCAAAGATCGTCTGGTACCGATCATCGCCGACGAAGCG |
| | CGTACTTTCGGTATGGAAGGTCTGTTCCGTCAGATTGGTATTTAC |
| | AGCCCGAACGGTCAGCAGTACACCCCGCAGGACCGCGAGCAGG |
| | TTGCTTACTATAAAGAAGACGAGAAAGGTCAGATTCTGCAGGA |
| | AGGGATCAACGAGCTGGGCGCAGGTTGTTCCTGGCTGGCAGCG |
| | GCGACCTCTTACAGCACCAACAATCTGCCGATGATCCCGTTCTA |
| | CATCTATTACTCGATGTTCGGCTTCCAGCGTATTGGCGATCTGTG |
| | CTGGGCGGCTGGCGACCAGCAAGCGCGTGGCTTCCTGATCGGCG |
| | GTACTTCCGGTCGTACCACCCTGAACGGCGAAGGTCTGCAGCAC |
| | GAAGATGGTCACAGCCACATTCAGTCGCTGACTATCCCGAACTG |
| | TATCTCTTACGACCCGGCTTACGCTTACGAAGTTGCTGTCATCAT |
| | GCATGACGGTCTGGAGCGTATGTACGGTGAAAAACAAGAGAAC |
| | GTTTACTACTACATCACTACGCTGAACGAAAACTACCACATGCC |
| | GGCAATGCCGGAAGGTGCTGAGGAAGGTATCCGTAAAGGTATC |
| | TACAAACTCGAAACTATTGAAGGTAGCAAAGGTAAAGTTCAGC |
| | TGCTCGGCTCCGGTTCTATCCTGCGTCACGTCCGTGAAGCAGCT |
| | GAGATCCTGGCGAAAGATTACGGCGTAGGTTCTGACGTTTATAG |
| | CGTGACCTCCTTCACCGAGCTGGCGCGTGATGGTCAGGATTGTG |
| | AACGCTGGAACATGCTGCACCCGCTGGAAACTCCGCGCGTTCCG |
| | TATATCGCTCAGGTGATGAACGACGCTCCGGCAGTGGCATCTAC |
| | CGACTATATGAAACTGTTCGCTGAGCAGGTCCGTACTTACGTAC |
| | CGGCTGACGACTACCGCGTACTGGGTACTGATGGCTTCGGTCGT |
| | TCCGACAGCCGTGAGAACCTGCGTCACCACTTCGAAGTTGATGC |
| | TTCTTATGTCGTGGTTGCGGCGCTGGGCGAACTGGCTAAACGTG |
| | GCGAAATCGATAAGAAAGTGGTTGCTGACGCAATCGCCAAATT |
| | CAACATCGATGCAGATAAAGTTAACCCGCGTCTGGCGTAA |
| aceF SEQ ID NO: 33 | ATGGCTATCGAAATCAAAGTACCGGACATCGGGGCTGATGAAG |
| | TTGAAATCACCGAGATCCTGGTCAAAGTGGGCGACAAAGTTGA |
| | AGCCGAACAGTCGCTGATCACCGTAGAAGGCGACAAAGCCTCT |
| | ATGGAAGTTCCGTCTCCGCAGGCGGGTATCGTTAAAGAGATCAA |
| | AGTCTCTGTTGGCGATAAAACCCAGACCGGCGCACTGATTATGA |
| | TTTTCGATTCCGCCGACGGTGCAGCAGACGCTGCACCTGCTCAG |
| | GCAGAAGAGAAGAAAGAAGCAGCTCCGGCAGCAGCACCAGCG |
| | GCTGCGGCGGCAAAAGACGTTAACGTTCCGGATATCGGCAGCG |
| | ACGAAGTTGAAGTGACCGAAATCCTGGTGAAAGTTGGCGATAA |
| | AGTTGAAGCTGAACAGTCGCTGATCACCGTAGAAGGCGACAAG |
| | GCTTCTATGGAAGTTCCGGCTCCGTTTGCTGGCACCGTGAAAGA |
| | GATCAAAGTGAACGTGGGTGACAAAGTGTCTACCGGCTCGCTG |
| | ATTATGGTCTTCGAAGTCGCGGGTGAAGCAGGCGCGGCAGCTCC |
| | GGCCGCTAAACAGGAAGCAGCTCCGGCAGCGGCCCCTGCACCA |
| | GCGGCTGGCGTGAAAGAAGTTAACGTTCCGGATATCGGCGGTG |
| | ACGAAGTTGAAGTGACTGAAGTGATGGTGAAAGTGGGCGACAA |
| | AGTTGCCGCTGAACAGTCACTGATCACCGTAGAAGGCGACAAA |
| | GCTTCTATGGAAGTTCCGGCGCCGTTTGCAGGCGTCGTGAAGGA |
| | ACTGAAAGTCAACGTTGGCGATAAAGTGAAAACTGGCTCGCTG |
| | ATTATGATCTTCGAAGTTGAAGGCGCAGCGCCTGCGGCAGCTCC |
| | TGCGAAACAGGAAGCGGCAGCGCCGGCACCGGCAGCAAAAGCT |
| | GAAGCCCCGGCAGCAGCACCAGCTGCGAAAGCGGAAGGCAAAT |
| | CTGAATTTGCTGAAAACGACGCTTATGTTCACGCGACTCCGCTG |
| | ATCCGCCGTCTGGCACGCGAGTTTGGTGTTAACCTTGCGAAAGT |
| | GAAGGGCACTGGCCGTAAAGGTCGTATCCTGCGCGAAGACGTT |
| | CAGGCTTACGTGAAAGAAGCTATCAAACGTGCAGAAGCAGCTC |
| | CGGCAGCGACTGGCGGTGGTATCCCTGGCATGCTGCCGTGGCCG |
| | AAGGTGGACTTCAGCAAGTTTGGTGAAATCGAAGAAGTGGAAC |
| | TGGGCCGCATCCAGAAAATCTCTGGTGCGAACCTGAGCCGTAAC |
| | TGGGTAATGATCCCGCATGTTACTCACTTCGACAAAACCGATAT |
| | CACCGAGTTGGAAGCGTTCCGTAAACAGCAGAACGAAGAAGCG |
| | GCGAAACGTAAGCTGGATGTGAAGATCACCCCGGTTGTCTTCAT |
| | CATGAAAGCCGTTGCTGCAGCTCTTGAGCAGATGCCTCGCTTCA |
| | ATAGTTCGCTGTCGGAAGACGGTCAGCGTCTGACCCTGAAGAAA |
| | TACATCAACATCGGTGTGGCGGTGGATACCCCGAACGGTCTGGT |
| | TGTTCCGGTATTCAAAGACGTCAACAAGAAAGGCATCATCGAGC |
| | TGTCTCGCGAGCTGATGACTATTTCTAAGAAAGCGCGTGACGGT |
| | AAGCTGACTGCGGGCGAAATGCAGGGCGGTTGCTTCACCATCTC |
| | CAGCATCGGCGGCCTGGGTACTACCCACTTCGCGCCGATTGTGA |
| | ACGCGCCGGAAGTGGCTATCCTCGGCGTTTCCAAGTCCGCGATG |
| | GAGCCGGTGTGGAATGGTAAAGAGTTCGTGCCGCGTCTGATGCT |
| | GCCGATTTCTCTCTCCTTCGACCACCGCGTGATCGACGGTGCTG |
| | ATGGTGCCCGTTTCATTACCATCATTAACAACACGCTGTCTGAC |
| | ATTCGCCGTCTGGTGATGTAA |
| lpd SEQ ID NO: 34 | ATGAGTACTGAAATCAAAACTCAGGTCGTGGTACTTGGGGCAG |
| | GCCCCGCAGGTTACTCCGCTGCCTTCCGTTGCGCTGATTTAGGTC |
| | TGGAAACCGTAATCGTAGAACGTTACAACACCCTTGGCGGTGTT |
| | TGCCTGAACGTCGGCTGTATCCCTTCTAAAGCACTGCTGCACGT |
| | AGCAAAAGTTATCGAAGAAGCCAAAGCGCTGGCTGAACACGGT |
| | ATCGTCTTCGGCGAACCGAAAACCGATATCGACAAGATTCGTAC |
| | CTGGAAAGAGAAAGTGATCAATCAGCTGACCGGTGGTCTGGCT |
| | GGTATGGCGAAAGGCCGCAAAGTCAAAGTGGTCAACGGTCTGG |
| | GTAAATTCACCGGGGCTAACACCCTGGAAGTTGAAGGTGAGAA |
| | CGGCAAAACCGTGATCAACTTCGACAACGCGATCATTGCAGCG |
| | GGTTCTCGCCCGATCCAACTGCCGTTTATTCCGCATGAAGATCC |
| | GCGTATCTGGGACTCCACTGACGCGCTGGAACTGAAAGAAGTA |
| | CCAGAACGCCTGCTGGTAATGGGTGGCGGTATCATCGGTCTGGA |
| | AATGGGCACCGTTTACCACGCGCTGGGTTCACAGATTGACGTGG |
| | TTGAAATGTTCGACCAGGTTATCCCGGCAGCTGACAAAGACATC |
| | GTTAAAGTCTTCACCAAGCGTATCAGCAAGAAATTCAACCTGAT |
| | GCTGGAAACCAAAGTTACCGCCGTTGAAGCGAAAGAAGACGGC |
| | ATTTATGTGACGATGGAAGGCAAAAAAGCACCCGCTGAACCGC |
| | AGCGTTACGACGCCGTGCTGGTAGCGATTGGTCGTGTGCCGAAC |
| | GGTAAAAACCTCGACGCAGGCAAAGCAGGCGTGGAAGTTGACG |
| | ACCGTGGTTTCATCCGCGTTGACAAACAGCTGCGTACCAACGTA |
| | CCGCACATCTTTGCTATCGGCGATATCGTCGGTCAACCGATGCT |
| | GGCACACAAAGGTGTTCACGAAGGTCACGTTGCCGCTGAAGTTA |
| | TCGCCGGTAAGAAACACTACTTCGATCCGAAAGTTATCCCGTCC |
| | ATCGCCTATACCAAACCAGAAGTTGCATGGGTGGGTCTGACTGA |
| | GAAAGAAGCGAAAGAGAAAGGCATCAGCTATGAAACCGCCACC |
| | TTCCCGTGGGCTGCTTCTGGTCGTGCTATCGCTTCCGACTGCGCA |
| | GACGGTATGACCAAGCTGATTTTCGACAAAGAATCTCACCGTGT |
| | GATCGGTGGTGCGATTGTCGGTACTAACGGCGGCGAGCTGCTGG |
| | GTGAAATCGGCCTGGCAATCGAAATGGGTTGTGATGCTGAAGA |
| | CATCGCACTGACCATCCACGCGCACCCGACTCTGCACGAGTCTG |
| | TGGGCCTGGCGGCAGAAGTGTTCGAAGGTAGCATTACCGACCTG |
| | CCGAACCCGAAAGCGAAGAAGAAGTAA |
| tesB SEQ ID NO: 10 | ATGAGTCAGGCGCTAAAAAATTTACTGACATTGTTAAATCTGGA |
| | AAAAATTGAGGAAGGACTCTTTCGCGGCCAGAGTGAAGATTTA |
| | GGTTTACGCCAGGTGTTTGGCGGCCAGGTCGTGGGTCAGGCCTT |
| | GTATGCTGCAAAAGAGACCGTCCCTGAAGAGCGGCTGGTACATT |
| | CGTTTCACAGCTACTTTCTTCGCCCTGGCGATAGTAAGAAGCCG |
| | ATTATTTATGATGTCGAAACGCTGCGTGACGGTAACAGCTTCAG |
| | CGCCCGCCGGGTTGCTGCTATTCAAAACGGCAAACCGATTTTTT |
| | ATATGACTGCCTCTTTCCAGGCACCAGAAGCGGGTTTCGAACAT |
| | CAAAAAACAATGCCGTCCGCGCCAGCGCCTGATGGCCTCCCTTC |
| | GGAAACGCAAATCGCCCAATCGCTGGCGCACCTGCTGCCGCCA |
| | GTGCTGAAAGATAAATTCATCTGCGATCGTCCGCTGGAAGTCCG |
| | TCCGGTGGAGTTTCATAACCCACTGAAAGGTCACGTCGCAGAAC |
| | CACATCGTCAGGTGTGGATCCGCGCAAATGGTAGCGTGCCGGAT |
| | GACCTGCGCGTTCATCAGTATCTGCTCGGTTACGCTTCTGATCTT |
| | AACTTCCTGCCGGTAGCTCTACAGCCGCACGGCATCGGTTTTCT |
| | CGAACCGGGGATTCAGATTGCCACCATTGACCATTCCATGTGGT |
| | TCCATCGCCCGTTTAATTTGAATGAATGGCTGCTGTATAGCGTG |
| | GAGAGCACCTCGGCGTCCAGCGCACGTGGCTTTGTGCGCGGTGA |
| | GTTTTATACCCAAGACGGCGTACTGGTTGCCTCGACCGTTCAGG |
| | AAGGGGTGATGCGTAATCACAATTAA |
| acuI SEQ ID NO: 35 | ATGCGTGCGGTACTGATCGAGAAGTCCGATGATACACAGTCCGT |
| | CTCTGTCACCGAACTGGCTGAAGATCAACTGCCGGAAGGCGAC |
| | GTTTTGGTAGATGTTGCTTATTCAACACTGAACTACAAAGACGC |
| | CCTGGCAATTACCGGTAAAGCCCCCGTCGTTCGTCGTTTTCCGAT |
| | GGTACCTGGAATCGACTTTACGGGTACCGTGGCCCAGTCTTCCC |
| | ACGCCGACTTCAAGCCAGGTGATCGCGTAATCCTGAATGGTTGG |
| | GGTGTGGGGGAAAAACATTGGGGCGGTTTAGCGGAGCGCGCTC |
| | GCGTGCGCGGAGACTGGCTTGTTCCCTTGCCAGCCCCCCTGGAC |
| | TTACGCCAAGCGGCCATGATCGGTACAGCAGGATACACGGCGA |
| | TGTTGTGCGTTCTGGCGCTTGAACGTCACGGAGTGGTGCCGGGT |
| | AATGGGGAAATCGTGGTGTCCGGTGCAGCAGGCGGCGTCGGCT |
| | CCGTTGCGACGACCCTTCTTGCCGCTAAGGGCTATGAGGTAGCG |
| | GCAGTGACTGGACGTGCGTCCGAAGCAGAATATCTGCGCGGTTT |
| | GGGGGCGGCGAGCGTAATTGATCGTAACGAATTAACGGGGAAG |
| | GTACGCCCGCTGGGTCAGGAGCGTTGGGCTOGCGGGATTGACGT |
| | GGCGGGATCAACCGTGCTTGCGAACATGCTTTCTATGATGAAGT |
| | ATCGCGGGGTAGTCGCTGCGTGTGGCCTGGCCGCGGGCATGGAT |
| | CTGCCCGCGTCTGTCGCGCCCTTTATTCTTCGTGGGATGACGCTG |
| | GCAGGGGTGGATAGCGTTATGTGCCCAAAGACAGATCGTTTAGC |
| | AGCGTGGGCCCGTTTGGCGTCAGATCTTGACCCTGCCAAGCTGG |
| | AGGAGATGACTACAGAGTTGCCGTTTAGTGAAGTAATCGAGAC |
| | AGCACCCAAATTCTTGGACGGGACGGTTCGTGGCCGCATTGTTA |
| | TCCCCGTAACGCCCTAA |

TABLE 5
Propionate Cassette Sequences Sleeping Beauty Operon

| | |
|---|---|
| Sbm | ATGTCTAACGTGCAGGAGTGGCAACAGCTTGCCAACAAGGAA |
| SEQ ID | TTGAGCCGTCGGGAGAAAACTGTCGACTCGCTGGTTCATCAAA |
| NO: 36 | CCGCGGAAGGGATCGCCATCAAGCCGCTGTATACCGAAGCCG |
| | ATCTCGATAATCTGGAGGTGACAGGTACCCTTCCTGGTTTGCC |
| | GCCCTACGTTCGTGGCCCGCGTGCCACTATGTATACCGCCCAA |
| | CCGTGGACCATCCGTCAGTATGCTGGTTTTTCAACAGCAAAAG |
| | AGTCCAACGCTTTTTATCGCCGTAACCTGGCCGCCGGGCAAAA |
| | AGGTCTTTCCGTTGCGTTTGACCTTGCCACCCACCGTGGCTAC |
| | GACTCCGATAACCCGCGCGTGGCGGGCGACGTCGGCAAAGCG |
| | GGCGTCGCTATCGACACCGTGGAAGATATGAAAGTCCTGTTCG |
| | ACCAGATCCCGCTGGATAAAATGTCGGTTTCGATGACCATGAA |
| | TGGCGCAGTGCTACCAGTACTGGCGTTTTATATCGTCGCCGCA |
| | GAAGAGCAAGGTGTTACACCTGATAAACTGACCGGCACCATT |
| | CAAAACGATATTCTCAAAGAGTACCTCTGCCGCAACACCTATA |
| | TTTACCCACCAAAACCGTCAATGCGCATTATCGCCGACATCAT |
| | CGCCTGGTGTTCCGGCAACATGCCGCGATTTAATACCATCAGT |
| | ATCAGCGGTTACCACATGGGTGAAGCGGGTGCCAACTGCGTG |
| | CAGCAGGTAGCATTTACGCTCGCTGATGGGATTGAGTACATCA |
| | AAGCAGCAATCTCTGCCGGACTGAAAATTGATGACTTCGCTCC |
| | TCGCCTGTCGTTCTTCTTCGGCATCGGCATGGATCTGTTTATGA |
| | ACGTCGCCATGTTGCGTGCGGCACGTTATTTATGGAGCGAAGC |
| | GGTCAGTGGATTTGGCGCACAGGACCCGAAATCACTGGCGCT |
| | GCGTACCCACTGCCAGACCTCAGGCTGGAGCCTGACTGAACA |
| | GGATCCGTATAACAACGTTATCCGCACCACCATTGAAGCGCTG |
| | GCTGCGACGCTGGGCGGTACTCAGTCACTGCATACCAACGCCT |
| | TTGACGAAGCGCTTGGTTTGCCTACCGATTTCTCAGCACGCAT |
| | TGCCCGCAACACCCAGATCATCATCCAGGAAGAATCAGAACT |
| | CTGCCGCACCGTCGATCCACTGGCCGGATCCTATTACATTGAG |
| | TCGCTGACCGATCAAATCGTCAAACAAGCCAGAGCTATTATCC |
| | AACAGATCGACGAAGCCGGTGGCATGGCGAAAGCGATCGAAG |
| | CAGGTCTGCCAAAACGAATGATCGAAGAGGCCTCAGCGCGCG |
| | AACAGTCGCTGATCGACCAGGGCAAGCGTGTCATCGTTGGTGT |
| | CAACAAGTACAAACTGGATCACGAAGACGAAACCGATGTACT |
| | TGAGATCGACAACGTGATGGTGCGTAACGAGCAAATTGCTTC |
| | GCTGGAACGCATTCGCGCCACCCGTGATGATGCCGCCGTAACC |
| | GCCGCGTTGAACGCCCTGACTCACGCCGCACAGCATAACGAA |
| | AACCTGCTGGCTGCCGCTGTTAATGCCGCTCGCGTTCGCGCCA |
| | CCCTGGGTGAAATTTCCGATGCGCTGGAAGTCGCTTTCGACCG |
| | TTATCTGGTGCCAAGCCAGTGTGTTACCGGCGTGATTGCGCAA |
| | AGCTATCATCAGTCTGAGAAATCGGCCTCCGAGTTCGATGCCA |
| | TTGTTGCGCAAACGGAGCAGTTCCTTGCCGACAATGGTCGTCG |
| | CCCGCGCATTCTGATCGCTAAGATGGGCCAGGATGGACACGA |
| | TCGCGGCGCGAAAGTGATCGCCAGCGCCTATTCCGATCTCGGT |
| | TTCGACGTAGATTTAAGCCCGATGTTCTCTACACCTGAAGAGA |
| | TCGCCCGCCTGGCCGTAGAAAACGACGTTCACGTAGTGGGCG |
| | CATCCTCACTGGCTGCCGGTCATAAAACGCTGATCCCGGAACT |
| | GGTCGAAGCGCTGAAAAAATGGGGACGCGAAGATATCTGCGT |
| | GGTCGCGGGTGGCGTCATTCCGCCGCAGGATTACGCCTTCCTG |
| | CAAGAGCGCGGCGTGGCGGCGATTTATGGTCCAGGTACACCT |
| | ATGCTCGACAGTGTGCGCGACGTACTGAATCTGATAAGCCAGC |
| | ATCATGATTAA |
| ygfD | ATGATTAATGAAGCCACGCTGGCAGAAAGTATTCGCCGCTTAC |
| SEQ ID | GTCAGGGTGAGCGTGCCACACTCGCCCAGGCCATGACGCTGG |
| NO: 37 | TGGAAAGCCGTCACCCGCGTCATCAGGCACTAAGTACGCAGC |
| | TGCTTGATGCCATTATGCCGTACTGCGGTAACACCCTGCGACT |
| | GGGCGTTACCGGCACCCCCGGCGCGGGGAAAAGTACCTTTCTT |
| | GAGGCCTTTGGCATGTTGTTGATTCGAGAGGGATTAAAGGTCG |
| | CGGTTATTGCGGTCGATCCCAGCAGCCCGGTCACTGGCGGTAG |
| | CATTCTCGGGGATAAAACCCGCATGAATGACCTGGCGCGTGCC |
| | GAAGCGGCGTTTATTCGCCCGGTACCATCCTCCGGTCATCTGG |
| | GCGGTGCCAGTCAGCGAGCGCGGGAATTAATGCTGTTATGCG |
| | AAGCAGCGGGTTATGACGTAGTGATTGTCGAAACGGTTGGCG |
| | TCGGGCAGTCGGAAACAGAAGTCGCCCGCATGGTGGACTGTT |
| | TTATCTCGTTGCAAATTGCCGGTGGCGGCGATGATCTGCAGGG |
| | CATTAAAAAAGGGCTGATGGAAGTGGCTGATCTGATCGTTATC |
| | AACAAAGACGATGGCGATAACCATACCAATGTCGCCATTGCC |
| | CGGCATATGTACGAGAGTGCCCTGCATATTCTGCGACGTAAAT |
| | ACGACGAATGGCAGCCACGGGTTCTGACTTGTAGCGCACTGG |
| | AAAAACGTGGAATCGATGAGATCTGGCACGCCATCATCGACT |
| | TCAAAACCGCGCTAACTGCCAGTGGTCGTTTACAACAAGTGCG |
| | GCAACAACAATCGGTGGAATGGCTGCGTAAGCAGACCGAAGA |
| | AGAAGTACTGAATCACCTGTTCGCGAATGAAGATTTCGATCGC |
| | TATTACCGCCAGACGCTTTTAGCGGTCAAAAACAATACGCTCT |
| | CACCGCGCACCGGCCTGCGGCAGCTCAGTGAATTTATCCAGAC |
| | GCAATATTTTGATTAA |
| ygfG | ATGTCTTATCAGTATGTTAACGTTGTCACTATCAACAAAGTGG |
| SEQ ID | CGGTCATTGAGTTTAACTATGGCCGAAAACTTAATGCCTTAAG |
| NO: 38 | TAAAGTCTTTATTGATGATCTTATGCAGGCGTTAAGCGATCTC |
| | AACCGGCCGGAAATTCGCTGTATCATTTTGCGCGCACCGAGTG |
| | GATCCAAAGTCTTCTCCGCAGGTCACGATATTCACGAACTGCC |
| | GTCTGGCGGTCGCGATCCGCTCTCCTATGATGATCCATTGCGT |
| | CAAATCACCCGCATGATCCAAAAATTCCCGAAACCGATCATTT |
| | CGATGGTGGAAGGTAGTGTTTGGGGTGGCGCATTTGAAATGAT |
| | CATGAGTTCCGATCTGATCATCGCCGCCAGTACCTCAACCTTC |
| | TCAATGACGCCTGTAAACCTCGGCGTCCCGTATAACCTGGTCG |
| | GCATTCACAACCTGACCCGCGACGCGGGCTTCCACATTGTCAA |
| | AGAGCTGATTTTTACCGCTTCGCCAATCACCGCCCAGCGCGCG |
| | CTGGCTGTCGGCATCCTCAACCATGTTGTGGAAGTGGAAGAAC |
| | TGGAAGATTTCACCTTACAAATGGCGCACCACATCTCTGAGAA |
| | AGCGCCGTTAGCCATTGCCGTTATCAAAGAAGAGCTGCGTGTA |
| | CTGGGCGAAGCACACACCATGAACTCCGATGAATTTGAACGT |
| | ATTCAGGGGATGCGCCGCGCGGTGTATGACAGCGAAGATTAC |
| | CAGGAAGGGATGAACGCTTTCCTCGAAAAACGTAAACCTAAT |
| | TTCGTTGGTCATTAA |
| ygfH | ATGGAAACTCAGTGGACAAGGATGACCGCCAATGAAGCGGCA |
| SEQ ID | GAAATTATCCAGCATAACGACATGGTGGCATTTAGCGGCTTTA |
| NO: 39 | CCCCGGCGGGTTCGCCGAAAGCCCTACCCACCGCGATTGCCCG |
| | CAGAGCTAACGAACAGCATGAGGCCAAAAAGCCGTATCAAAT |
| | TCGCCTTCTGACGGGTGCGTCAATCAGCGCCGCCGCTGACGAT |
| | GTACTTTCTGACGCCGATGCTGTTTCCTGGCGTGCGCCATATC |
| | AAACATCGTCCGGTTTACGTAAAAAGATCAATCAGGGCGCGG |
| | TGAGTTTCGTTGACCTGCATTTGAGCGAAGTGGCGCAAATGGT |
| | CAATTACGGTTTCTTCGGCGACATTGATGTTGCCGTCATTGAA |
| | GCATCGGCACTGGCACCGGATGGTCGAGTCTGGTTAACCAGC |
| | GGGATCGGTAATGCGCCGACCTGGCTGCTGCGGGCGAAGAAA |
| | GTGATCATTGAACTCAATCACTATCACGATCCGCGCGTTGCAG |
| | AACTGGCGGATATTGTGATTCCTGGCGCGCCACCGCGGCGCAA |
| | TAGCGTGTCGATCTTCCATGCAATGGATCGCGTCGGTACCCGC |
| | TATGTGCAAATCGATCCGAAAAAGATTGTCGCCGTCGTGGAA |
| | ACCAACTTGCCCGACGCCGGTAATATGCTGGATAAGCAAAAT |
| | CCCATGTGCCAGCAGATTGCCGATAACGTGGTCACGTTCTTAT |
| | TGCAGGAAATGGCGCATGGGCGTATTCCGCCGGAATTTCTGCC |
| | GCTGCAAAGTGGCGTGGGCAATATCAATAATGCGGTAATGGC |
| | GCGTCTGGGGGAAAACCCGGTAATTCCTCCGTTTATGATGTAT |
| | TCGGAAGTGCTACAGGAATCGGTGGTGCATTTACTGGAAACC |
| | GGCAAAATCAGCGGGGCCAGCGCCTCCAGCCTGACAATCTCG |
| | GCCGATTCCCTGCGCAAGATTTACGACAATATGGATTACTTTG |
| | CCAGCCGCATTGTGTTGCGTCCGCAGGAGATTTCCAATAACCC |
| | GGAAATCATCCGTCGTCTGGGCGTCATCGCTCTGAACGTCGGC |
| | CTGGAGTTTGATATTTACGGGCATGCCAACTCAACACACGTAG |
| | CCGGGGTCGATCTGATGAACGGCATCGGCGGCAGCGGTGATT |
| | TTGAACGCAACGCGTATCTGTCGATCTTTATGGCCCCGTCGAT |
| | TGCTAAAGAAGGCAAGATCTCAACCGTCGTGCCAATGTGCAG |
| | CCATGTTGATCACAGCGAACACAGCGTCAAAGTGATCATCACC |
| | GAACAAGGGATCGCCGATCTGCGCGGTCTTTCCCCGCTTCAAC |
| | GCGCCCGCACTATCATTGATAATTGTGCACATCCTATGTATCG |
| | GGATTATCTGCATCGCTATCTGGAAAATGCGCCTGGCGGACAT |
| | ATTCACCACGATCTTAGCCACGTCTTCGACTTACACCGTAATTT |
| | AATTGCAACCGGCTCGATGCTGGGTTAA |

TABLE 6
Sequences of Propionate Cassette from
Propioni Bacteria

| Des- | |
|---|---|
| cription | Sequence |
| mutA | ATGAGCAGCACGGATCAGGGGACCAACCCCGCCGACACTGAC |
| SEQ ID | GACCTCACTCCCACCACACTCAGTCTGGCCGGGGATTTCCCCA |
| NO: 40 | AGGCCACTGAGGAGCAGTGGGAGCGCGAAGTTGAGAAGGTAT |
| | TCAACCGTGGTCGTCCACCGGAGAAGCAGCTGACCTTCGCCGA |
| | GTGTCTGAAGCGCCTGACGGTTCACACCGTCGATGGCATCGAC |
| | ATCGTGCCGATGTACCGTCCGAAGGACGCGCCGAAGAAGCTG |
| | GGTTACCCCGGCGTCACCCCCTTCACCCGCGGCACCACGGTGC |
| | GCAACGGTGACATGGATGCCTGGGACGTGCGCGCCCTGCACG |
| | AGGATCCCGACGAGAAGTTCACCCGCAAGGCGATCCTTGAAG |
| | ACCTGGAGCGTGGCGTCACCTCCCTGTTGTTGCGCGTTGATCC |
| | CGACGCGATCGCACCCGAGCACCTCGACGAGGTCCTCTCCGAC |
| | GTCCTGCTGGAAATGACCAAGGTGGAGGTCTTCAGCCGCTACG |
| | ACCAGGGTGCCGCCGCCGAGGCCTTGATGGGCGTCTACGAGC |
| | GCTCCGACAAGCCGGCGAAGGACCTGGCCCTGAACCTGGGCC |
| | TGGATCCCATCGGCTTCGCGGCCCTGCAGGGCACCGAGCCGG |
| | ATCTGACCGTGCTCGGTGACTGGGTGCGCCGCCTGGCGAAGTT |
| | CTCACCGGACTCGCGCGCCGTCACGATCGACGCGAACGTCTAC |
| | CACAACGCCGGTGCCGGCGACGTGGCAGAGCTCGCTTGGGCA |
| | CTGGCCACCGGCGCGGAGTACGTGCGCGCCCTGGTCGAACAG |
| | GGCTTCAACGCCACAGAGGCCTTCGACACGATCAACTTCCGTG |
| | TCACCGCCACCCACGACCAGTTCCTCACGATCGCCCGTCTTCG |
| | CGCCCTGCGCGAGGCATGGGCCCGCATCGGCGAGGTCTTTGGC |
| | GTGGACGAGGACAAGCGCGGCGCTCGCCAGAATGCGATCACC |
| | AGTTGGCGTGAGCTCACCCGCGAAGACCCCTATGTCAACATCC |
| | TTCGCGGTTCGATTGCCACCTTCTCCGCCTCCGTTGGCGGGGC |
| | CGAGTCGATCACGACGCTGCCCTTCACCCAGGCCCTCGGCCTG |
| | CCGGAGGACGACTTCCCGCTGCGCATCGCGCGCAACACGGGC |
| | ATCGTGCTCGCCGAAGAGGTGAACATCGGCCGCGTCAACGAC |
| | CCGGCCGGTGGCTCCTACTACGTCGAGTCGCTCACTCGCACCC |
| | TGGCCGACGCTGCCTGGAAGGAATTCCAGGAGGTCGAGAAGC |
| | TCGGTGGCATGTCGAAGGCGGTCATGACCGAGCACGTCACCA |
| | AGGTGCTCGACGCCTGCAATGCCGAGCGCGCCAAGCGCCTGG |
| | CCAACCGCAAGCAGCCGATCACCGCGGTCAGCGAGTTCCCGA |
| | TGATCGGGGCCCGCAGCATCGAGACCAAGCCGTTCCCAACCG |
| | CTCCGGCGCGCAAGGGCCTGGCCTGGCATCGCGATTCCGAGGT |
| | GTTCGAGCAGCTGATGGATCGCTCCACCAGCGTCTCCGAGCGC |
| | CCCAAGGTGTTCCTTGCCTGCCTGGGCACCCGTCGCGACTTCG |
| | GTGGCCGCGAGGGCTTCTCCAGCCCGGTATGGCACATCGCCGG |
| | TATCGACACCCCGCAGGTCGAAGGCGGCACCACCGCCGAGAT |
| | CGTCGAGGCGTTCAAGAAGTCGGGCGCCCAGGTGGCCGATCT |
| | CTGCTCGTCCGCCAAGATCTACGCGCAGCAGGGACTTGAGGTT |
| | GCCAAGGCGCTCAAGGCCGCCGGCGCGAAGGCCCTGTATCTG |
| | TCGGGCGCCTTCAAGGAGTTCGGCGATGACGCCGCCGAGGCC |
| | GAGAAGCTGATCGACGGACGCCTGTACATGGGCATGGATGTC |
| | GTCGACACCCTGTCCTCCACCCTTGATATCTTGGGAGTCGCGA |
| | AGTGA |
| mutB | GTGAGCACTCTGCCCCGTTTTGATTCAGTTGACCTGGGCAATG |
| SEQ ID | CCCCGGTTCCTGCTGATGCCGCACAGCGCTTCGAGGAGTTGGC |
| NO: 41 | CGCCAAGGCCGGCACCGAAGAGGCGTGGGAGACGGCTGAGCA |
| | GATTCCGGTTGGCACCCTGTTCAACGAAGACGTCTACAAGGAC |
| | ATGGACTGGCTGGACACCTACGCCGGTATCCCGCCGTTCGTCC |
| | ACGGCCCATATGCAACCATGTACGCGTTCCGTCCCTGGACGAT |
| | TCGCCAGTACGCCGGCTTCTCCACGGCCAAGGAGTCCAACGCC |
| | TTCTACCGCCGCAACCTTGCGGCGGGCCAGAAGGGCCTGTCGG |
| | TTGCCTTCGACCTGCCCACCCACCGCGGCTACGACTCGGACAA |
| | TCCCCGCGTCGCCGGTGACGTCGGCATGGCCGGGGTGGCCATC |
| | GACTCCATCTATGACATGCGCGAGCTGTTCGCCGGCATTCCGC |
| | TGGACCAGATGAGCGTGTCGATGACCATGAACGGCGCCGTGC |
| | TGCCGATCCTGGCCCTCTATGTGGTGACCGCCGAGGAGCAGGG |
| | CGTCAAGCCCGAGCAGCTCGCCGGGACGATCCAGAACGACAT |
| | CCTCAAGGAGTTCATGGTTCGTAACACCTATATCTACCCGCCG |
| | CAGCCGAGTATGCGAATCATCTCCGAGATCTTCGCCTACACGA |
| | GTGCCAATATGCCGAAGTGGAATTCGATTTCCATTTCCGGCTA |
| | CCACATGCAGGAAGCCGGCGCCACGGCCGACATCGAGATGGC |
| | CTACACCCTGGCCGACGGTGTCGACTACATCCGCGCCGGCGAG |
| | TCGGTGGGCCTCAATGTCGACCAGTTCGCGCCGCGTCTGTCCT |
| | TCTTCTGGGGCATCGGCATGAACTTCTTCATGGAGGTTGCCAA |
| | GCTGCGTGCCGCACGTATGTTGTGGGCCAAGCTGGTGCATCAG |
| | TTCGGGCCGAAGAATCCGAAGTCGATGAGCCTGCGCACCCAC |
| | TCGCAGACCTCCGGTTGGTCGCTGACCGCCCAGGACGTCTACA |
| | ACAACGTCGTGCGTACCTGCATCGAGGCCATGGCCGCCACCCA |
| | GGGCCATACCCAGTCGCTGCACACGAACTCGCTCGACGAGGC |
| | CATTGCCCTACCGACCGATTTCAGCGCCCGCATCGCCCGTAAC |
| | ACCCAGCTGTTCCTGCAGCAGGAATCGGGCACGACGCGCGTG |
| | ATCGACCCGTGGAGCGGCTCGGCATACGTCGAGGAGCTCACC |
| | TGGGACCTGGCCCGCAAGGCATGGGGCCACATCCAGGAGGTC |
| | GAGAAGGTCGGCGGCATGGCCAAGGCCATCGAAAAGGGCATC |
| | CCCAAGATGCGCATTGAGGAAGCCGCCGCCCGCACCCAGGCA |
| | CGCATCGACTCCGGCCGTCAGCCGCTGATCGGCGTGAACAAGT |
| | ACCGCCTGGAGCACGAGCCGCCGCTCGATGTGCTCAAGGTTG |
| | ACAACTCCACGGTGCTCGCCGAGCAGAAGGCCAAGCTGGTCA |
| | AGCTGCGCGCCGAGCGCGATCCCGAGAAGGTCAAGGCCGCCC |
| | TCGACAAGATCACCTGGGCTGCCGCCAACCCCGACGACAAGG |
| | ATCCGGATCGCAACCTGCTGAAGCTGTGCATCGACGCTGGCCG |
| | CGCCATGGCGACGGTCGGCGAGATGAGCGACGCGCTCGAGAA |
| | GGTCTTCGGACGCTACACCGCCCAGATTCGCACCATCTCCGGT |
| | GTGTACTCGAAGGAAGTGAAGAACACGCCTGAGGTTGAGGAA |
| | GCACGCGAGCTCGTTGAGGAATTCGAGCAGGCCGAGGGCCGT |
| | CGTCCTCGCATCCTGCTGGCCAAGATGGGCCAGGACGGTCACG |
| | ACCGTGGCCAGAAGGTCATCGCCACCGCCTATGCCGACCTCGG |
| | TTTCGACGTCGACGTGGGCCCGCTGTTCCAGACCCCGGAGGAG |
| | ACCGCACGTCAGGCCGTCGAGGCCGATGTGCACGTGGTGGGC |
| | GTTTCGTCGCTCGCCGGCGGGCATCTGACGCTGGTTCCGGCCC |
| | TGCGCAAGGAGCTGGACAAGCTCGGACGTCCCGACATCCTCA |
| | TCACCGTGGGCGGCGTGATCCCTGAGCAGGACTTCGACGAGCT |
| | GCGTAAGGACGGCGCCGTGGAGATCTACACCCCCGGCACCGT |
| | CATTCCGGAGTCGGCGATCTCGCTGGTCAAGAAACTGCGGGCT |
| | TCGCTCGATGCCTAG |
| GI: | ATGAGTAATGAGGATCTTTTCATCTGTATCGATCACGTGGCAT |
| 18042134 | ATGCGTGCCCCGACGCCGACGAGGCTTCCAAGTACTACCAGG |
| SEQ ID | AGACCTTCGGCTGGCATGAGCTCCACCGCGAGGAGAACCCGG |
| NO: 42 | AGCAGGGAGTCGTCGAGATCATGATGGCCCCGGCTGCGAAGC |
| | TGACCGAGCACATGACCCAGGTTCAGGTCATGGCCCCGCTCAA |
| | CGACGAGTCGACCGTTGCCAAGTGGCTTGCCAAGCACAATGG |
| | TCGCGCCGGACTGCACCACATGGCATGGCGTGTCGATGACATC |
| | GACGCCGTCAGCGCCACCCTGCGCGAGCGCGGCGTGCAGCTG |
| | CTGTATGACGAGCCCAAGCTCGGCACCGGCGGCAACCGCATC |
| | AACTTCATGCATCCCAAGTCGGGCAAGGGCGTGCTCATCGAGC |
| | TCACCCAGTACCCGAAGAACTGA |
| mmdA | ATGGCTGAAAACAACAATTTGAAGCTCGCCAGCACCATGGAA |
| SEQ ID | GGTCGCGTGGAGCAGCTCGCAGAGCAGCGCCAGGTGATCGAA |
| NO: 43 | GCCGGTGGCGGCGAACGTCGCGTCGAGAAGCAACATTCCCAG |
| | GGTAAGCAGACCGCTCGTGAGCGCCTGAACAACCTGCTCGAT |
| | CCCCATTCGTTCGACGAGGTCGGCGCTTTCCGCAAGCACCGCA |
| | CCACGTTGTTCGGCATGGACAAGGCCGTCGTCCCGGCAGATGG |
| | CGTGGTCACCGGCCGTGGCACCATCCTTGGTCGTCCCGTGCAC |
| | GCCGCGTCCCAGGACTTCACGGTCATGGGTGGTTCGGCTGGCG |
| | AGACGCAGTCCACGAAGGTCGTCGAGACGATGGAACAGGCGC |
| | TGCTCACCGGCACGCCCTTCCTGTTCTTCTACGATTCGGGCGG |
| | CGCCCGGATCCAGGAGGGCATCGACTCGCTGAGCGGTTACGG |
| | CAAGATGTTCTTCGCCAACGTGAAGCTGTCGGGCGTCGTGCCG |
| | CAGATCGCCATCATTGCCGGCCCCTGTGCCGGTGGCGCCTCGT |
| | ATTCGCCGGCACTGACTGACTTCATCATCATGACCAAGAAGGC |
| | CCATATGTTCATCACGGGCCCCCAGGTCATCAAGTCGGTCACC |
| | GGCGAGGATGTCACCGCTGACGAACTCGGTGGCGCTGAGGCC |
| | CATATGGCCATCTCGGGCAATATCCACTTCGTGGCCGAGGACG |
| | ACGACGCCGCGGAGCTCATTGCCAAGAAGCTGCTGAGCTTCCT |
| | TCCGCAGAACAACACTGAGGAAGCATCCTTCGTCAACCCGAA |
| | CAATGACGTCAGCCCCAATACCGAGCTGCGCGACATCGTTCCG |
| | ATTGACGGCAAGAAGGGCTATGACGTGCGCGATGTCATTGCC |
| | AAGATCGTCGACTGGGGTGACTACCTCGAGGTCAAGGCCGGC |
| | TATGCCACCAACCTCGTGACCGCCTTCGCCCGGGTCAATGGTC |
| | GTTCGGTGGGCATCGTGGCCAATCAGCCGTCGGTGATGTCGGG |
| | TTGCCTCGACATCAACGCCTCTGACAAGGCCGCCGAATTCGTG |
| | AATTTCTGCGATTCGTTCAACATCCCGCTGGTGCAGCTGGTCG |
| | ACGTGCCGGGCTTCCTGCCCGGCGTGCAGCAGGAGTACGGCG |
| | GCATCATTCGCCATGGCGCGAAGATGCTGTACGCCTACTCCGA |
| | GGCCACCGTGCCGAAGATCACCGTGGTGCTCCGCAAGGCCTA |
| | CGGCGGCTCCTACCTGGCCATGTGCAACCGTGACCTTGGTGCC |
| | GACGCCGTGTACGCCTGGCCCAGCGCCGAGATTGCGGTGATG |
| | GGCGCCGAGGGTGCGGCAAATGTGATCTTCCGCAAGGAGATC |
| | AAGGCTGCCGACGATCCCGACGCCATGCGCGCCGAGAAGATC |
| | GAGGAGTACCAGAACGCGTTCAACACGCCGTACGTGGCCGCC |
| | GCCCGCGGTCAGGTCGACGACGTGATTGACCCGGCTGATACCC |
| | GTCGAAAGATTGCTTCCGCCCTGGAGATGTACGCCACCAAGCG |
| | TCAGACCCGCCCGGCGAAGAAGCATGGAAACTTCCCCTGCTG |
| | A |
| PFREUD_ | ATGAGTCCGCGAGAAATTGAGGTTTCCGAGCCGCGCGAGGTT |
| 18870 | GGTATCACCGAGCTCGTGCTGCGCGATGCCCATCAGAGCCTGA |
| SEQ ID | TGGCCACACGAATGGCAATGGAAGACATGGTCGGCGCCTGTG |
| NO: 44 | CAGACATTGATGCTGCCGGGTACTGGTCAGTGGAGTGTTGGGG |
| | TGGTGCCACGTATGACTCGTGTATCCGCTTCCTCAACGAGGAT |
| | CCTTGGGAGCGTCTGCGCACGTTCCGCAAGCTGATGCCCAACA |
| | GCCGTCTCCAGATGCTGCTGCGTGGCCAGAACCTGCTGGGTTA |
| | CCGCCACTACAACGACGAGGTCGTCGATCGCTTCGTCGACAAG |
| | TCCGCTGAGAACGGCATGGACGTGTTCCGTGTCTTCGACGCCA |
| | TGAATGATCCCCGCAACATGGCGCACGCCATGGCTGCCGTCAA |
| | GAAGGCCGGCAAGCACGCGCAGGGCACCATTTGCTACACGAT |
| | CAGCCCGGTCCACACCGTTGAGGGCTATGTCAAGCTTGCTGGT |
| | CAGCTGCTCGACATGGGTGCTGATTCCATCGCCCTGAAGGACA |
| | TGGCCGCCCTGCTCAAGCCGCAGCCGGCCTACGACATCATCAA |
| | GGCCATCAAGGACACCTACGGCCAGAAGACGCAGATCAACCT |
| | GCACTGCCACTCCACCACGGGTGTCACCGAGGTCTCCCTCATG |
| | AAGGCCATCGAGGCCGGCGTCGACGTCGTCGACACCGCCATC |
| | TCGTCCATGTCGCTCGGCCCGGGCCACAACCCCACCGAGTCGG |
| | TTGCCGAGATGCTCGAGGGCACCGGGTACACCACCAACCTTG |
| | ACTACGATCGCCTGCACAAGATCCGCGATCACTTCAAGGCCAT |
| | CCGCCCGAAGTACAAGAAGTTCGAGTCGAAGACGCTTGTCGA |
| | CACCTCGATCTTCAAGTCGCAGATCCCCGGCGGCATGCTCTCC |
| | AACATGGAGTCGCAGCTGCGCGCCCAGGGCGCCGAGGACAAG |
| | ATGGACGAGGTCATGGCAGAGGTGCCGCGCGTCCGCAAGGCC |
| | GCCGGCTTCCCGCCCCTGGTCACCCCGTCCAGCCAGATCGTCG |
| | GCACGCAGGCCGTGTTCAACGTGATGATGGGCGAGTACAAGA |
| | GGATGACCGGCGAGTTCGCCGACATCATGCTCGGCTACTACGG |
| | CGCCAGCCCGGCCGATCGCGATCCGAAGGTGGTCAAGTTGGC |
| | CGAGGAGCAGTCCGGCAAGAAGCCGATCACCCAGCGCCCGGC |
| | CGATCTGCTGCCCCCCGAGTGGGAGGAGCAGTCCAAGGAGGC |
| | CGCGGCCCTCAAGGGCTTCAACGGCACCGACGAGGACGTGCT |
| | CACCTATGCACTGTTCCCGCAGGTCGCTCCGGTCTTCTTCGAG |
| | CATCGCGCCGAGGGCCCGCACAGCGTGGCTCTCACCGATGCCC |
| | AGCTGAAGGCCGAGGCCGAGGGCGACGAGAAGTCGCTCGCCG |
| | TGGCCGGTCCCGTCACCTACAACGTGAACGTGGGCGGAACCG |
| | TCCGCGAAGTCACCGTTCAGCAGGCGTGA |
| Bccp | ATGAAACTGAAGGTAACAGTCAACGGCACTGCGTATGACGTT |
| SEQ ID | GACGTTGACGTCGACAAGTCACACGAAAACCCGATGGGCACC |
| NO: 45 | ATCCTGTTCGGCGGCGGCACCGGCGGCGCGCCGGCACCGCGC |
| | GCAGCAGGTGGCGCAGGCGCCGGTAAGGCCGGAGAGGGCGA |
| | GATTCCCGCTCCGCTGGCCGGCACCGTCTCCAAGATCCTCGTG |
| | AAGGAGGGTGACACGGTCAAGGCTGGTCAGACCGTGCTCGTT |
| | CTCGAGGCCATGAAGATGGAGACCGAGATCAACGCTCCCACC |
| | GACGGCAAGGTCGAGAAGGTCCTTGTCAAGGAGCGTGACGCC |
| | GTGCAGGGCGGTCAGGGTCTCATCAAGATCGGCTGA |

[0287] In some embodiments, the genetically engineered bacteria comprise one or more nucleic acid sequence(s) of Table 4 (SEQ ID NO: 21-SEQ ID NO: 35, and SEQ ID NO: 10) or a functional fragment thereof. In some embodiments, the genetically engineered bacteria comprise a nucleic acid sequence that, but for the redundancy of the genetic code, encodes the same polypeptide as one or more nucleic acid s sequence(s) of Table 4 (SEQ ID NO: 21-SEQ ID NO: 35, and SEQ ID NO: 10) or a functional fragment thereof. In some embodiments, genetically engineered bacteria comprise a nucleic acid sequence that is at least about 80%, at least about 85%, at least about 90%, at least about 95%, or at least about 99% homologous to the DNA sequence of one or more nucleic acid sequence(s) of Table 4 (SEQ ID NO: 21-SEQ ID NO: 35, and SEQ ID NO: 10) or a functional fragment thereof, or a nucleic acid sequence that, but for the redundancy of the genetic code, encodes the same polypeptide as one or more nucleic acid sequence(s) of Table 4 (SEQ ID NO: 21-SEQ ID NO: 35, and SEQ ID NO: 10) or a functional fragment thereof.

[0288] In some embodiments, the genetically engineered bacteria comprise one or more nucleic acid sequence(s) of Table 5 (SEQ ID NO: 36-SEQ ID NO: 39) or a functional fragment thereof. In some embodiments, the genetically engineered bacteria comprise a nucleic acid sequence that, but for the redundancy of the genetic code, encodes the same polypeptide as one or more nucleic acid s sequence(s) of Table 5 (SEQ ID NO: 36-SEQ ID NO: 39) or a functional fragment thereof. In some embodiments, genetically engineered bacteria comprise a nucleic acid sequence that is at least about 80%, at least about 85%, at least about 90%, at least about 95%, or at least about 99% homologous to the DNA sequence of one or more nucleic acid sequence(s) of Table 5 (SEQ ID NO: 36-SEQ ID NO: 39) or a functional fragment thereof, or a nucleic acid sequence that, but for the redundancy of the genetic code, encodes the same polypeptide as one or more nucleic acid sequence(s) of Table 5 (SEQ ID NO: 36-SEQ ID NO: 39) or a functional fragment thereof.

[0289] In some embodiments, the genetically engineered bacteria comprise one or more nucleic acid sequence(s) of Table 6 (SEQ ID NO: 40-SEQ ID NO: 45) or a functional fragment thereof. In some embodiments, the genetically engineered bacteria comprise a nucleic acid sequence that, but for the redundancy of the genetic code, encodes the same polypeptide as one or more nucleic acid s sequence(s) of Table 6 (SEQ ID NO: 40-SEQ ID NO: 45) or a functional fragment thereof. In some embodiments, genetically engineered bacteria comprise a nucleic acid sequence that is at least about 80%, at least about 85%, at least about 90%, at least about 95%, or at least about 99% homologous to the DNA sequence of one or more nucleic acid sequence(s) of Table 6 (SEQ ID NO: 40-SEQ ID NO: 45) or a functional fragment thereof, or a nucleic acid sequence that, but for the redundancy of the genetic code, encodes the same polypeptide as one or more nucleic acid sequence(s) of Table 6 (SEQ ID NO: 40-SEQ ID NO: 45) or a functional fragment thereof.

[0290] Table 7 lists exemplary polypeptide sequences, which may be encoded by the propionate production gene(s) or cattette(s) of the genetically engineered bacteria.

TABLE 7
Polypeptide Sequences for Propionate Synthesis

| | |
|---|---|
| Pct | MRKVPIITADEAAKLIKDGDTVTTSGFVGNAIPEALDRAVEKRFLETGE |
| SEQ ID | PKNITYVYCGSQGNRDGRGAEHFAHEGLLKRYIAGHWATVPALGKM |
| NO: 46 | AMENKMEAYNVSQGALCHLFRDIASHKPGVFTKVGIGTFIDPRNGGG |
| | KVNDITKEDIVELVEIKGQEYLFYPAFPIHVALIRGTYADESGNITFEKE |
| | VAPLEGTSVCQAVKNSGGIVVVQVERVVKAGTLDPRHVKVPGIYVDY |
| | VVVADPEDHQQSLDCEYDPALSGEHRRPEVVGEPLPLSAKKVIGRRGA |
| | IELEKDVAVNLGVGAPEYVASVADEEGIVDFMTLTAESGAIGGVPAGG |
| | VRFGASYNADALIDQGYQFDYYDGGGLDLCYLGLAECDEKGNINVSR |
| | FGPRIAGCGGFINITQNTPKVFFCGTFTAGGLKVKIEDGKVIIVQEGKQK |
| | KFLKAVEQITFNGDVALANKQQVTYITERCVFLLKEDGLHLSEIAPGID |
| | LQTQILDVMDFAPIIDRDANGQIKLMDAALFAEGLMGLKEMKS* |
| lcdA | MSLTQGMKAKQLLAYFQGKADQDAREAKARGELVCWSASVAPPEFC |
| SEQ ID | VTMGIAMIYPETHAAGIGARKGAMDMLEVADRKGYNVDCCSYGRVN |
| NO: 47 | MGYMECLKEAAITGVKPEVLVNSPAADVPLPDLVITCNNICNTLLKWY |
| | ENLAAELDIPCIVIDVPFNHTMPIPEYAKAYIADQFRNAISQLEVICGRPF |
| | DWKKFKEVKDQTQRSVYHWNRIAEMAKYKPSPLNGFDLFNYMALIV |
| | ACRSLDYAEITFKAFADELEENLKAGIYAFKGAEKTRFQWEGIAVWPH |
| | LGHTFKSMKNLNSIMTGTAYPALWDLHYDANDESMHSMAEAYTRIYI |
| | NTCLQNKVEVLLGIMEKGQVDGTVYHLNRSCKLMSFLNVETAEIIKEK |
| | NGLPYVSIDGDQTDPRVFSPAQFDTRVQALVEMMEANMAAAE* |
| lcdB | MSRVEAILSQLKDVAANPKKAMDDYKAETGKGAVGIMPIYSPEEMVH |
| SEQ ID | AAGYLPMGIWGAQGKTISKARTYLPAFACSVMQQVMELQCEGAYDD |
| NO: 48 | LSAVIFSVPCDTLKCLSQKWKGTSPVIVFTHPQNRGLEAANQFLVTEYE |
| | LVKAQLESVLGVKISNAALENSIAIYNENRAVMREFVKVAADYPQVID |
| | AVSRHAVFKARQFMLKEKHTALVKELIAEIKATPVQPWDGKKVVVTG |
| | ILLEPNELLDIFNEFKIAIVDDDLAQESRQIRVDVLDGEGGPLYRMAKA |
| | WQQMYGCSLATDTKKGRGRMLINKTIQTGADAIVVAMMKFCDPEEW |
| | DYPVMYREFEEKGVKSLMIEVDQEVSSFEQIKTRLQSFVEML* |
| lcdC | MYTLGIDVGSASSKAVILKDGKDIVAAEVVQVGTGSSGPQRALDKAFEV |
| SEQ ID | SGLKKEDISYTVATGYGRFNFSDADKQISEISCHAKGIYFLVPTARTIIDIG |
| NO: 49 | GQDAKAIRLDDKGGIKQFFMNDKCAAGTGRFLEVMARVLETTLDEMAE |
| | LDEQATDTAPISSTCTVFAESEVISQLSNGVSRNNIIKGVHLSVASRACGL |
| | AYRGGLEKDVVMTGGVAKNAGVVRAVAGVLKTDVIVAPNPQTTGALG |
| | AALYAYEAAQKKX |
| etfA | MAFNSADINSFRDIWVFCEQREGKLINTDFELISEGRKLADERGSKLVG |
| SEQ ID | ILLGHEVEEIAKELGGYGADKVIVCDHPELKFYTTDAYAKVLCDVVME |
| NO: 50 | EKPEVILIGATNIGRDLGPRCAARLHTGLTADCTHLDIDMNKYVDFLST |
| | SSTLDISSMTFPMEDTNLKMTRPAFGGHLMATIICPRFRPCMSTVRPGV |
| | MKKAEFSQEMAQACQVVTRHVNLSDEDLKTKVINIVKETKKIVDLIGA |
| | EIIVSVGRGISKDVQGGIALAEKLADAFGNGVVGGSRAVIDSGWLPAD |
| | HQVGQTGKTVHPKVYVALGISGAIQHKAGMQDSELIIAVNKDETAPIF |
| | DCADYGITGDLFKIVPMMIDAIKEGKNA* |
| acrB | MRIYVCVKQVPDTSGKVAVNPDGTLNRASMAAIINPDDMSAIEQALKL |
| SEQ ID | KDETGCQVTALTMGPPPAEGMLREIIAMGADDGVLISAREFGGSDTFA |
| NO: 51 | TSQIISAAIHKLGLSNEDMIFCGRQAIDGDTAQVGPQIAEKLSIPQVTYG |
| | AGIKKSGDLVLVKRMLEDGYMMIEVETPCLITCIQDKAVKPRYMTLN |
| | GIMECYSKPLLVLDYEALKDEPLIELDTIGLKGSPTNIFKSFTPPQKGVG |
| | VMLQGTDKEKVEDLVDKLMQKHVI* |
| acrC | MFLLKIKKERMKRMDFSLTREQEMLKKLARQFAEIELEPVAEEIDREH |
| SEQ ID | VFPAENFKKMAEIGLTGIGIPKEFGGSGGGTLEKVIAVSEFGKKCMASA |
| NO: 52 | SILSIHLIAPQAIYKYGTKEQKETYLPRLTKGGELGAFALTEPNAGSDAG |
| | AVKTTAILDSQTNEYVLNGTKCFISGGGRAGVLVIFALTEPKKGLKGM |
| | SAIIVEKGTPGFSIGKVESKMGIAGSETAELIFEDCRVPAANLLGKEGKG |
| | FKIAMEALDGARIGVGAQAIGIAEGAIDLSVKYVHERIQFGKPIANLQGI |
| | QWYIADMATKTAAARALVEFAAYLEDAGKPFTKESAMCKLNASENA |
| | RFVTNLALQIHGGYGYMKDYPLERMYRDAKITEIYEGTSEIHKVVIAR |
| | EVMKR* |
| thrAfbr | MRVLKFGGTSVANAERFLRVADILESNARQGQVATVLSAPAKITNHLV |
| SEQ ID | AMIEKTISGQDALPNISDAERIFAELLTGLAAAQPGFPLAQLKTFVDQEF |
| NO: 53 | AQIKHVLHGISLLGQCPDSINAALICRGEKMSIAIMAGVLEARGHNVTV |
| | IDPVEKLLAVGHYLESTVDIAESTRRIAASRIPADHMVLMAGFTAGNEK |
| | GELVVLGRNGSDYSAAVLAACLRADCCEIWTDVDGVYTCDPRQVPD |
| | ARLLKSMSYQEAMELSYFGAKVLHPRTITPIAQFQIPCLIKNTGNPQAP |
| | GTLIGASRDEDELPVKGISNLNNMAMFSVSGPGMKGMVGMAARVFA |
| | AMSRARISVVLITQSSSEYSISFCVPQSDCVRAERAMQEEFYLELKEGLL |
| | EPLAVTERLAIISVVGDGMRTLRGISAKFFAALARANINIVAIAQRSSER |
| | SISVVVNNDDATTGVRVTHQMLFNTDQVIEVFVIGVGGVGGALLEQL |
| | KRQQSWLKNKHIDLRVCGVANSKALLTNVHGLNLENWQEELAQAKE |
| | PFNLGRLIRLVKEYHLLNPVIVDCTSSQAVADQYADFLREGFHVVTPN |
| | KKANTSSMDYYHQLRYAAEKSRRKFLYDTNVGAGLPVIENLQNLLNA |
| | GDELMKFSGILSGSLSYIFGKLDEGMSFSEATTLAREMGYTEPDPRDDL |
| | SGMDVARKLLILARETGRELELADIEIEPVLPAEFNAEGDVAAFMANLS |
| | QLDDLFAARVAKARDEGKVLRYVGNIDEDGVCRVKIAEVDGNDPLFK |
| | VKNGENALAFYSHYYQPLPLVLRGYGAGNDVTAAGVFADLLRILSW |
| | KLGV* |
| thrB | MVKVYAPASSANMSVGFDVLGAAVTPVDGALLGDVVTVEAAETFSL |
| SEQ ID | NNLGRFADKLPSEPRENIVYQCWERFCQELGKQIPVAMTLEKNMPIGS |
| NO: 54 | GLGSSACSVVAALMAMNEHCGKPLNDTRLLALMGELEGRISGSIHYD |
| | NVAPCFLGGMQLMIEENDIISQQVPGFDEWLWVLAYPGIKVSTAEARA |
| | ILPAQYRRQDCIAHGRHLAGFIHACYSRQPELAAKLMKDVIAEPYRER |
| | LLPGFRQARQAVAEIGAVASGISGSGPTLFALCDKPETAQRVADWLGK |
| | NYLQNQEGFVHICRLDTAGARVLEN* |
| thrC | MKLYNLKDHNEQVSFAQAVTQGLGKNQGLFFPHDLPEFSLTEIDEML |
| SEQ ID | KLDFVTRSAKILSAFIGDEIPQEILEERVRAAFAFPAPVANVESDVGCLE |
| NO: 55 | LFHGPTLAFKDFGGRFMAQMLTHIAGDKPVTILTATSGDTGAAVAHAF |
| | YGLPNVKVVILYPRGKISPLQEKLFCTLGGNIETVAIDGDFDACQALVK |
| | QAFDDEELKVALGLNSANSINISRLLAQICYYFEAVAQLPQETRNQLVV |
| | SVPSGNFGDLTAGLLAKSLGLPVKRFIAATNVNDTVPRFLHDGQWSPK |
| | ATQATLSNAMDVSQPNNWPRVEELFRRKIWQLKELGYAAVDDETTQ |
| | QTMRELKELGYTSEPHAAVAYRALRDQLNPGEYGLFLGTAHPAKFKE |
| | SVEAILGETLDLPKELAERADLPLLSHNLPADFAALRKLMMNHQ* |
| ilvA^{fbr} | MSETYVSEKSPGVMASGAELIRAADIQTAQARISSVIAPTPLQYCPRLSE |
| SEQ ID | ETGAEIYLKREDLQDVRSYKIRGALNSGAQLTQEQRDAGIVAASAGNH |
| NO: 56 | AQGVAYVCKSLGVQGRIYVPVQTPKQKRDRIMVHGGEFVSLVVTGNN |
| | FDEASAAAHEDAERTGATLIEPFDARNTVIGQGTVAAEILSQLTSMGKS |
| | ADHVMVPVGGGGLLAGVVSYMADMAPRTAIVGIEPAGAASMQAALH |
| | NGGPITLETVDPFVDGAAVKRVGDLNYTIVEKNQGRVHMMSATEGAV |
| | CTEMLDLYQNEGIIAEPAGALSIAGLKEMSFAPGSAVVCIISGGNNDVL |
| | RYAEIAERSLVHRGLKHYFLVNFPQKPGQLRHFLEDILGPDDDITLFEY |
| | LKRNNRETGTALVGIHLSEASGLDSLLERMEESAIDSRRLEPGTPEYEY |
| | LT* |
| ace | MSERFPNDVDPIETRDWLQAIESVIREEGVERAQYLIDQLLAEARKGGV |
| SEQ ID | NVAAGTGISNYINTIPVEEQPEYPGNLELERRIRSAIRWNAIMTVLRASK |
| NO: 57 | KDLELGGHMASFQSSATIYDVCFNHFFRARNEQDGGDLVYFQGHISPG |
| | VYARAFLEGRLTQEQLDNFRQEVHGNGLSSYPHPKLMPEFWQFPTVS |
| | MGLGPIGAIYQAKFLKYLEHRGLKDTSKQTVYAFLGDGEMDEPESKG |
| | AITIATREKLDNLVFVINCNLQRLDGPVTGNGKIINELEGIFEGAGWNVI |
| | KVMWGSRWDELLRKDTSGKLIQLMNETVDGDYQTFKSKDGAYVREH |
| | FFGKYPETAALVADWTDEQIWALNRGGHDPKKIYAAFKKAQETKGK |
| | ATVILAHTIKGYGMGDAAEGKNIAHQVKKMNMDGVRHIRDRFNVPVS |
| | DADIEKLPYITFPEGSEEHTYLHAQRQKLHGYLPSRQPNFTEKLELPSLQ |
| | DFGALLEEQSKEISTTIAFVRALNVMLKNKSIKDRLVPIIADEARTFGME |
| | GLFRQIGIYSPNGQQYTPQDREQVAYYKEDEKGQILQEGINELGAGCS |
| | WLAAATSYSTNNLPMIPFYIYYSMFGFQRIGDLCWAAGDQQARGFLIG |
| | GTSGRTTLNGEGLQHEDGHSHIQSLTIPNCISYDPAYAYEVAVIMHDGL |
| | ERMYGEKQENVYYYITTLNENYHMPAMPEGAEEGIRKGIYKLETIEGS |
| | KGKVQLLGSGSILRHVREAAEILAKDYGVGSDVYSVTSFTELARDGQD |
| | CERWNMLHPLETPRVPYIAQVMNDAPAVASTDYMKLFAEQVRTYVP |
| | ADDYRVLGTDGFGRSDSRENLRHHFEVDASYVVVAALGELAKRGEID |
| | KKVVADAIAKFNIDADKVNPRLA* |
| aceF | MAIEIKVPDIGADEVEITEILVKVGDKVEAEQSLITVEGDKASMEVPSPQ |
| SEQ ID | AGIVKEIKVSVGDKTQTGALIMIFDSADGAADAAPAQAEEKKEAAPAA |
| NO: 58 | APAAAAAKDVNVPDIGSDEVEVTEILVKVGDKVEAEQSLITVEGDKAS |
| | MEVPAPFAGTVKEIKVNVGDKVSTGSLIMVFEVAGEAGAAAPAAKQE |
| | AAPAAAPAPAAGVKEVNVPDIGGDEVEVTEVMVKVGDKVAAEQSLIT |
| | VEGDKASMEVPAPFAGVVKELKVNVGDKVKTGSLIMIFEVEGAAPAA |
| | APAKQEAAAPAPAAKAEAPAAAPAAKAEGKSEFAENDAYVHATPLIR |
| | RLAREFGVNLAKVKGTGRKGRILREDVQAYVKEAIKRAEAAPAATGG |
| | GIPGMLPWPKVDFSKFGEIEEVELGRIQKISGANLSRNWVMIPHVTHFD |
| | KTDITELEAFRKQQNEEAAKRKLDVKITPVVFIMKAVAAALEQMPRFN |
| | SSLSEDGQRLTLKKYINIGVAVDTPNGLVVPVFKDVNKKGIIELSRELM |
| | TISKKARDGKLTAGEMQGGCFTISSIGGLGTTHFAPIVNAPEVAILGVSK |
| | SAMEPVWNGKEFVPRLMLPISLSFDHRVIDGADGARFITIINNTLSDIRR |
| | LVM* |
| Lpd | MSTEIKTQVVVLGAGPAGYSAAFRCADLGLETVIVERYNTLGGVCLN |
| SEQ ID | VGCIPSKALLHVAKVIEEAKALAEHGIVFGEPKTDIDKIRTWKEKVINQ |
| NO: 59 | LTGGLAGMAKGRKVKVVNGLGKFTGANTLEVEGENGKTVINFDNAII |
| | AAGSRPIQLPFIPHEDPRIWDSTDALELKEVPERLLVMGGGIIGLEMGTV |
| | YHALGSQIDVVEMFDQVIPAADKDIVKVFTKRISKKFNLMLETKVTAV |
| | EAKEDGIYVTMEGKKAPAEPQRYDAVLVAIGRVPNGKNLDAGKAGV |
| | EVDDRGFIRVDKQLRTNVPHIFAIGDIVGQPMLAHKGVHEGHVAAEVI |
| | AGKKHYFDPKVIPSIAYTKPEVAWVGLTEKEAKEKGISYETATFPWAA |
| | SGRAIASDCADGMTKLIFDKESHRVIGGAIVGTNGGELLGEIGLAIEMG |
| | CDAEDIALTIHAHPTLHESVGLAAEVFEGSITDLPNPKAKKK* |
| tesB | MSQALKNLLTLLNLEKIEEGLFRGQSEDLGLRQVFGGQVVGQALYAA |
| SEQ ID | KETVPEERLVHSFHSYFLRPGDSKKPIIYDVETLRDGNSFSARRVAAIQ |
| NO: 20 | NGKPIFYMTASFQAPEAGFEHQKTMPSAPAPDGLPSETQIAQSLAHLLP |
| | PVLKDKFICDRPLEVRPVEFHNPLKGHVAEPHRQVWIRANGSVPDDLR |
| | VHQYLLGYASDLNFLPVALQPHGIGFLEPGIQIATIDHSMWFHRPFNLN |
| | EWLLYSVESTSASSARGFVRGEFYTQDGVLVASTVQEGVMRNHN* |
| acuI | MRAVLIEKSDDTQSVSVTELAEDQLPEGDVLVDVAYSTLNYKDALAIT |
| SEQ ID | GKAPVVRRFPMVPGIDFTGTVAQSSHADFKPGDRVILNGWGVGEKHW |
| NO: 60 | GGLAERARVRGDWLVPLPAPLDLRQAAMIGTAGYTAMLCVLALERH |
| | GVVPGNGEIVVSGAAGGVGSVATTLLAAKGYEVAAVTGRASEAEYLR |
| | GLGAASVIDRNELTGKVRPLGQERWAGGIDVAGSTVLANMLSMMKY |
| | RGVVAACGLAAGMDLPASVAPFILRGMTLAGVDSVMCPKTDRLAAW |
| | ARLASDLDPAKLEEMTTELPFSEVIETAPKFLDGTVRGRIVIPVTP* |
| Sbm | MSNVQEWQQLANKELSRREKTVDSLVHQTAEGIAIKPLYTEADLDNL |
| SEQ ID | EVTGTLPGLPPYVRGPRATMYTAQPWTIRQYAGFSTAKESNAFYRRNL |
| NO: 61 | AAGQKGLSVAFDLATHRGYDSDNPRVAGDVGKAGVAIDTVEDMKVL |
| | FDQIPLDKMSVSMTMNGAVLPVLAFYIVAAEEQGVTPDKLTGTIQNDI |
| | LKEYLCRNTYIYPPKPSMRIIADIIAWCSGNMPRFNTISISGYHMGEAGA |
| | NCVQQVAFTLADGIEYIKAAISAGLKIDDFAPRLSFFFGIGMDLFMNVA |
| | MLRAARYLWSEAVSGFGAQDPKSLALRTHCQTSGWSLTEQDPYNNVI |
| | RTTIEALAATLGGTQSLHTNAFDEALGLPTDFSARIARNTQIIIQEESELC |
| | RTVDPLAGSYYIESLTDQIVKQARAIIQQIDEAGGMAKAIEAGLPKRMI |
| | EEASAREQSLIDQGKRVIVGVNKYKLDHEDETDVLEIDNVMVRNEQIA |
| | SLERIRATRDDAAVTAALNALTHAAQHNENLLAAAVNAARVRATLGE |
| | ISDALEVAFDRYLVPSQCVTGVIAQSYHQSEKSASEFDAIVAQTEQFLA |
| | DNGRRPRILIAKMGQDGHDRGAKVIASAYSDLGFDVDLSPMFSTPEEIA |
| | RLAVENDVHVVGASSLAAGHKTLIPELVEALKKWGREDICVVAGGVIP |
| | PQDYAFLQERGVAAIYGPGTPMLDSVRDVLNLISQHHD* |
| ygfD | MINEATLAESIRRLRQGERATLAQAMTLVESRHPRHQALSTQLLDAIM |
| SEQ ID | PYCGNTLRLGVTGTPGAGKSTFLEAFGMLLIREGLKVAVIAVDPSSPVT |
| NO: 62 | GGSILGDKTRMNDLARAEAAFIRPVPSSGHLGGASQRARELMLLCEAA |
| | GYDVVIVETVGVGQSETEVARMVDCFISLQIAGGGDDLQGIKKGLME |
| | VADLIVINKDDGDNHTNVAIARHMYESALHILRRKYDEWQPRVLTCS |
| | ALEKRGIDEIWHAIIDFKTALTASGRLQQVRQQQSVEWLRKQTEEEVL |
| | NHLFANEDFDRYYRQTLLAVKNNTLSPRTGLRQLSEFIQTQYFD* |
| ygfG | MSYQYVNVVTINKVAVIEFNYGRKLNALSKVFIDDLMQALSDLNRPEI |
| SEQ ID | RCIILRAPSGSKVFSAGHDIHELPSGGRDPLSYDDPLRQITRMIQKFPKPI |
| NO: 63 | ISMVEGSVWGGAFEMIMSSDLIIAASTSTFSMTPVNLGVPYNLVGIHNL |
| | TRDAGFHIVKELIFTASPITAQRALAVGILNHVVEVEELEDFTLQMAHH |
| | ISEKAPLAIAVIKEELRVLGEAHTMNSDEFERIQGMRRAVYDSEDYQEG |
| | MNAFLEKRKPNFVGH* |
| ygfH | METQWTRMTANEAAEIIQHNDMVAFSGFTPAGSPKALPTAIARRANEQ |
| SEQ ID | HEAKKPYQIRLLTGASISAAADDVLSDADAVSWRAPYQTSSGLRKKIN |
| NO: 64 | QGAVSFVDLHLSEVAQMVNYGFFGDIDVAVIEASALAPDGRVWLTSGI |
| | GNAPTWLLRAKKVIIELNHYHDPRVAELADIVIPGAPPRRNSVSIFHAM |
| | DRVGTRYVQIDPKKIVAVVETNLPDAGNMLDKQNPMCQQIADNVVTF |
| | LLQEMAHGRIPPEFLPLQSGVGNINNAVMARLGENPVIPPFMMYSEVL |
| | QESVVHLLETGKISGASASSLTISADSLRKIYDNMDYFASRIVLRPQEIS |
| | NNPEIIRRLGVIALNVGLEFDIYGHANSTHVAGVDLMNGIGGSGDFERN |
| | AYLSIFMAPSIAKEGKISTVVPMCSHVDHSEHSVKVIITEQGIADLRGLS |
| | PLQRARTIIDNCAHPMYRDYLHRYLENAPGGHIHHDLSHVFDLHRNLI |
| | ATGSMLG* |
| mutA | MSSTDQGTNPADTDDLTPTTLSLAGDFPKATEEQWEREVEKVFNRGRPP |
| SEQ ID | EKQLTFAECLKRLTVHTVDGIDIVPMYRPKDAPKKLGYPGVTPFTRGTT |
| NO: 65 | VRNGDMDAWDVRALHEDPDEKFTRKAILEDLERGVTSLLLRVDPDAIA |
| | PEHLDEVLSDVLLEMTKVEVFSRYDQGAAAEALMGVYERSDKPAKDLA |
| | LNLGLDPIGFAALQGTEPDLTVLGDWVRRLAKFSPDSRAVTIDANVYHN |
| | AGAGDVAELAWALATGAEYVRALVEQGFNATEAFDTINFRVTATHDQF |
| | LTIARLRALREAWARIGEVFGVDEDKRGARQNAITSWRELTREDPYVNI |
| | LRGSIATFSASVGGAESITTLPFTQALGLPEDDFPLRIARNTGIVLAEEVNI |
| | GRVNDPAGGSYYVESLTRTLADAAWKEFQEVEKLGGMSKAVMTEHVT |
| | KVLDACNAERAKRLANRKQPITAVSEFPMIGARSIETKPFPTAPARKGLA |
| | WHRDSEVFEQLMDRSTSVSERPKVFLACLGTRRDFGGREGFSSPVWHIA |
| | GIDTPQVEGGTTAEIVEAFKKSGAQVADLCSSAKIYAQQGLEVAKALKA |
| | AGAKALYLSGAFKEFGDDAAEAEKLIDGRLYMGMDVVDTLSSTLDILG |
| | VAK |
| mutB | VSTLPRFDSVDLGNAPVPADAAQRFEELAAKAGTEEAWETAEQIPVGTL |
| SEQ ID | FNEDVYKDMDWLDTYAGIPPFVHGPYATMYAFRPWTIRQYAGFSTAKE |
| NO: 66 | SNAFYRRNLAAGQKGLSVAFDLPTHRGYDSDNPRVAGDVGMAGVAIDS |
| | IYDMRELFAGIPLDQMSVSMTMNGAVLPILALYVVTAEEQGVKPEQLA |
| | GTIQNDILKEFMVRNTYIYPPQPSMRIISEIFAYTSANMPKWNSISISGYH |
| | MQEAGATADIEMAYTLADGVDYIRAGESVGLNVDQFAPRLSFFWGIGM |
| | NFFMEVAKLRAARMLWAKLVHQFGPKNPKSMSLRTHSQTSGWSLTAQ |
| | DVYNNVVRTCIEAMAATQGHTQSLHTNSLDEAIALPTDFSARIARNTQL |
| | FLQQESGTTRVIDPWSGSAYVEELTWDLARKAWGHIQEVEKVGGMAK |
| | AIEKGIPKMRIEEAAARTQARIDSGRQPLIGVNKYRLEHEPPLDVLKVDN |
| | STVLAEQKAKLVKLRAERDPEKVKAALDKITWAAANPDDKDPDRNLLK |
| | LCIDAGRAMATVGEMSDALEKVFGRYTAQIRTISGVYSKEVKNTPEVEE |
| | ARELVEEFEQAEGRRPRILLAKMGQDGHDRGQKVIATAYADLGFDVDV |
| | GPLFQTPEETARQAVEADVHVVGVSSLAGGHLTLVPALRKELDKLGRP |
| | DILITVGGVIPEQDFDELRKDGAVEIYTPGTVIPESAISLVKKLRASLDA |
| GI:180421 | MSNEDLFICIDHVAYACPDADEASKYYQETFGWHELHREENPEQGVVEI |
| 34 | MMAPAAKLTEHMTQVQVMAPLNDESTVAKWLAKHNGRAGLHHMAW |
| SEQ ID | RVDDIDAVSATLRERGVQLLYDEPKLGTGGNRINFMHPKSGKGVLIELT |
| NO: 67 | QYPKN |
| mmdA | MAENNNLKLASTMEGRVEQLAEQRQVIEAGGGERRVEKQHSQGKQTA |
| SEQ ID | RERLNNLLDPHSFDEVGAFRKHRTTLFGMDKAVVPADGVVTGRGTILG |
| NO: 68 | RPVHAASQDFTVMGGSAGETQSTKVVETMEQALLTGTPFLFFYDSGGA |
| | RIQEGIDSLSGYGKMFFANVKLSGVVPQIAIIAGPCAGGASYSPALTDFII |
| | MTKKAHMFITGPQVIKSVTGEDVTADELGGAEAHMAISGNIHFVAEDD |
| | DAAELIAKKLLSFLPQNNTEEASFVNPNNDVSPNTELRDIVPIDGKKGYD |
| | VRDVIAKIVDWGDYLEVKAGYATNLVTAFARVNGRSVGIVANQPSVMS |
| | GCLDINASDKAAEFVNFCDSFNIPLVQLVDVPGFLPGVQQEYGGIIRHGA |
| | KMLYAYSEATVPKITVVLRKAYGGSYLAMCNRDLGADAVYAWPSAEI |
| | AVMGAEGAANVIFRKEIKAADDPDAMRAEKIEEYQNAFNTPYVAAARG |
| | QVDDVIDPADTRRKIASALEMYATKRQTRPAKKHGNFPC |
| PFREUD_ | MSPREIEVSEPREVGITELVLRDAHQSLMATRMAMEDMVGACADIDAA |
| 18870 | GYWSVECWGGATYDSCIRFLNEDPWERLRTFRKLMPNSRLQMLLRGQN |
| SEQ ID | LLGYRHYNDEVVDRFVDKSAENGMDVFRVFDAMNDPRNMAHAMAAV |
| NO: 69 | KKAGKHAQGTICYTISPVHTVEGYVKLAGQLLDMGADSIALKDMAALL |
| | KPQPAYDIIKAIKDTYGQKTQINLHCHSTTGVTEVSLMKAIEAGVDVVD |
| | TAISSMSLGPGHNPTESVAEMLEGTGYTTNLDYDRLHKIRDHFKAIRPKY |
| | KKFESKTLVDTSIFKSQIPGGMLSNMESQLRAQGAEDKMDEVMAEVPR |
| | VRKAAGFPPLVTPSSQIVGTQAVFNVMMGEYKRMTGEFADIMLGYYGA |
| | SPADRDPKVVKLAEEQSGKKPITQRPADLLPPEWEEQSKEAAALKGFNG |
| | TDEDVLTYALFPQVAPVFFEHRAEGPHSVALTDAQLKAEAEGDEKSLAV |
| | AGPVTYNVNVGGTVREVTVQQA |
| Bccp | MKLKVTVNGTAYDVDVDVDKSHENPMGTILFGGGTGGAPAPRAAGGA |
| SEQ ID | GAGKAGEGEIPAPLAGTVSKILVKEGDTVKAGQTVLVLEAMKMETEIN |
| NO: 70 | APTDGKVEKVLVKERDAVQGGQGLIKIG |

[0291] In some embodiments, the genetically engineered bacteria encode one or more polypeptide sequences of Table 7 (SEQ ID NO: 46-SEQ ID NO: 70, and SEQ ID NO: 20) or a functional fragment or variant thereof. In some embodiments, genetically engineered bacteria comprise a polypeptide sequence that is at least about 80%, at least about 85%, at least about 90%, at least about 95%, or at least about 99% homologous to the polypeptide sequence of one or more polypeptide sequence of Table 7 (SEQ ID NO: 46-SEQ ID NO: 70, and SEQ ID NO: 20) or a functional fragment thereof.

[0292] In one embodiment, the bacterial cell comprises a non-native or heterologous propionate gene cassette. In some embodiments, the disclosure provides a bacterial cell that comprises a non-native or heterologous propionate gene cassette operably linked to a first promoter. In one embodiment, the first promoter is an inducible promoter. In one embodiment, the bacterial cell comprises a propionate gene cassette from a different organism, e.g., a different species of bacteria. In another embodiment, the bacterial cell comprises more than one copy of a native gene encoding a propionate gene cassette. In yet another embodiment, the bacterial cell comprises at least one native gene encoding a propionate gene cassette, as well as at least one copy of a propionate gene cassette from a different organism, e.g., a different species of bacteria. In one embodiment, the bacterial cell comprises at least one, two, three, four, five, or six copies of a gene encoding a propionate gene cassette. In one embodiment, the bacterial cell comprises multiple copies of a gene or genes encoding a propionate gene cassette.

[0293] Multiple distinct propionate gene cassettes are known in the art. In some embodiments, a propionate gene cassette is encoded by a gene cassette derived from a bacterial species. In some embodiments, a propionate gene cassette is encoded by a gene cassette derived from a non-bacterial species. In some embodiments, a propionate gene cassette is encoded by a gene derived from a eukaryotic species, e.g., a fungi. In one embodiment, the gene encoding the propionate gene cassette is derived from an organism of the genus or species that includes, but is not limited to, Clostridium propionicum, Megasphaera elsdenii, or Prevotella ruminicola.

[0294] In one embodiment, the propionate gene cassette has been codon-optimized for use in the engineered bacterial cell. In one embodiment, the propionate gene cassette has been codon-optimized for use in Escherichia coli. In another embodiment, the propionate gene cassette has been codon-optimized for use in Lactococcus. When the propionate gene cassette is expressed in the engineered bacterial cells, the bacterial cells produce more propionate than unmodified bacteria of the same bacterial subtype under the same conditions (e.g., culture or environmental conditions). Thus, the genetically engineered bacteria comprising a heterologous propionate gene cassette may be used to generate propionate to treat autoimmune disease, such as IBD.

[0295] The present disclosure further comprises genes encoding functional fragments of propionate biosynthesis enzymes or functional variants of a propionate biosynthesis enzyme. As used herein, the term “functional fragment thereof” or “functional variant thereof” relates to an element having qualitative biological activity in common with the wild-type enzyme from which the fragment or variant was derived. For example, a functional fragment or a functional variant of a mutated propionate biosynthesis enzyme is one which retains essentially the same ability to synthesize propionate as the propionate biosynthesis enzyme from which the functional fragment or functional variant was derived. For example a polypeptide having propionate biosynthesis enzyme activity may be truncated at the N-terminus or C-terminus, and the retention of propionate biosynthesis enzyme activity assessed using assays known to those of skill in the art, including the exemplary assays provided herein. In one embodiment, the engineered bacterial cell comprises a heterologous gene encoding a propionate biosynthesis enzyme functional variant. In another embodiment, the engineered bacterial cell comprises a heterologous gene encoding a propionate biosynthesis enzyme functional fragment.

[0296] As used herein, the term “percent (%) sequence identity” or “percent (%) identity,” also including “homology,” is defined as the percentage of amino acid residues or nucleotides in a candidate sequence that are identical with the amino acid residues or nucleotides in the reference sequences after aligning the sequences and introducing gaps, if necessary, to achieve the maximum percent sequence identity, and not considering any conservative substitutions as part of the sequence identity. Optimal alignment of the sequences for comparison may be produced, besides manually, by means of the local homology algorithm of Smith and Waterman, 1981, Ads App. Math. 2, 482, by means of the local homology algorithm of Neddleman and Wunsch, 1970, J. Mol. Biol. 48, 443, by means of the similarity search method of Pearson and Lipman, 1988, Proc. Natl. Acad. Sci. USA 85, 2444, or by means of computer programs which use these algorithms (GAP, BESTFIT, FASTA, BLAST P, BLAST N and TFASTA in Wisconsin Genetics Software Package, Genetics Computer Group, 575 Science Drive, Madison, Wis.).

[0297] The present disclosure encompasses propionate biosynthesis enzymes comprising amino acids in its sequence that are substantially the same as an amino acid sequence described herein. Amino acid sequences that are substantially the same as the sequences described herein include sequences comprising conservative amino acid substitutions, as well as amino acid deletions and/or insertions. A conservative amino acid substitution refers to the replacement of a first amino acid by a second amino acid that has chemical and/or physical properties (e.g., charge, structure, polarity, hydrophobicity/hydrophilicity) that are similar to those of the first amino acid. Conservative substitutions include replacement of one amino acid by another within the following groups: lysine (K), arginine (R) and histidine (H); aspartate (D) and glutamate (E); asparagine (N), glutamine (Q), serine (S), threonine (T), tyrosine (Y), K, R, H, D and E; alanine (A), valine (V), leucine (L), isoleucine (I), proline (P), phenylalanine (F), tryptophan (W), methionine (M), cysteine (C) and glycine (G); F, W and Y; C, S and T. Similarly contemplated is replacing a basic amino acid with another basic amino acid (e.g., replacement among Lys, Arg, His), replacing an acidic amino acid with another acidic amino acid (e.g., replacement among Asp and Glu), replacing a neutral amino acid with another neutral amino acid (e.g., replacement among Ala, Gly, Ser, Met, Thr, Leu, Ile, Asn, Gin, Phe, Cys, Pro, Trp, Tyr, Val).

[0298] In some embodiments, a propionate biosynthesis enzyme is mutagenized; mutants exhibiting increased activity are selected; and the mutagenized gene encoding the propionate biosynthesis enzyme is isolated and inserted into the bacterial cell of the disclosure. The gene comprising the modifications described herein may be present on a plasmid or chromosome.

[0299] In one embodiment, the propionate biosynthesis gene cassette is from Clostridium spp. In one embodiment, the Clostridium spp. is Clostridium propionicum. In another embodiment, the propionate biosynthesis gene cassette is from a Megasphaera spp. In one embodiment, the Megasphaera spp. is Megasphaera elsdenii. In another embodiment, the propionate biosynthesis gene cassette is from Prevotella spp. In one embodiment, the Prevotella spp. is Prevotella ruminicola. Other propionate biosynthesis gene cassettes are well-known to one of ordinary skill in the art.

[0300] In some embodiments, the genetically engineered bacteria comprise the genes pct, lcd, and acr from Clostridium propionicum. In some embodiments, the genetically engineered bacteria comprise acrylate pathway genes for propionate biosynthesis, e.g., pct, lcdA, lcdB, lcdC, etfA, acrB, and acrC. In alternate embodiments, the genetically engineered bacteria comprise pyruvate pathway genes for propionate biosynthesis, e.g., thrA^{fbr}, thrB, thrC, thrC, ilvA^{fbr}, aceE, aceF, and lpd, and optionally further comprise tesB. The genes may be codon-optimized, and translational and transcriptional elements may be added.

[0301] In one embodiment, the pct gene has at least about 80% identity with SEQ ID NO: 21. In another embodiment, the pct gene has at least about 85% identity with SEQ ID NO: 21. In one embodiment, the pct gene has at least about 90% identity with SEQ ID NO: 21. In one embodiment, the pct gene has at least about 95% identity with SEQ ID NO: 21. In another embodiment, the pct gene has at least about 96%, 97%, 98%, or 99% identity with SEQ ID NO: 21. Accordingly, in one embodiment, the pct gene has at least about 80%, 821%, 82%, 83%, 84%, 85%, 86%, 87%, 88%, 89%, 90%, 921%, 92%, 93%, 94%, 95%, 96%, 97%, 98%, or 99% identity with SEQ ID NO: 21. In another embodiment, the pct gene comprises the sequence of SEQ ID NO: 21. In yet another embodiment the pct gene consists of the sequence of SEQ ID NO: 21.

[0302] In one embodiment, the lcdA gene has at least about 80% identity with SEQ ID NO: 22. In another embodiment, the lcdA gene has at least about 85% identity with SEQ ID NO: 22. In one embodiment, the lcdA gene has at least about 90% identity with SEQ ID NO: 22. In one embodiment, the lcdA gene has at least about 95% identity with SEQ ID NO: 22. In another embodiment, the lcdA gene has at least about 96%, 97%, 98%, or 99% identity with SEQ ID NO: 22. Accordingly, in one embodiment, the lcdA gene has at least about 80%, 81%, 822%, 83%, 84%, 85%, 86%, 87%, 88%, 89%, 90%, 91%, 922%, 93%, 94%, 95%, 96%, 97%, 98%, or 99% identity with SEQ ID NO: 22. In another embodiment, the lcdA gene comprises the sequence of SEQ ID NO: 22. In yet another embodiment the lcdA gene consists of the sequence of SEQ ID NO: 22.

[0303] In one embodiment, the lcdB gene has at least about 80% identity with SEQ ID NO: 23. In another embodiment, the lcdB gene has at least about 85% identity with SEQ ID NO: 23. In one embodiment, the lcdB gene has at least about 90% identity with SEQ ID NO: 23. In one embodiment, the lcdB gene has at least about 95% identity with SEQ ID NO: 23. In another embodiment, the lcdB gene has at least about 96%, 97%, 98%, or 99% identity with SEQ ID NO: 23. Accordingly, in one embodiment, the lcdB gene has at least about 80%, 81%, 82%, 823%, 84%, 85%, 86%, 87%, 88%, 89%, 90%, 91%, 92%, 923%, 94%, 95%, 96%, 97%, 98%, or 99% identity with SEQ ID NO: 23. In another embodiment, the lcdB gene comprises the sequence of SEQ ID NO: 23. In yet another embodiment the lcdB gene consists of the sequence of SEQ ID NO: 23.

[0304] In one embodiment, the lcdC gene has at least about 80% identity with SEQ ID NO: 24. In another embodiment, the lcdC gene has at least about 85% identity with SEQ ID NO: 24. In one embodiment, the lcdC gene has at least about 90% identity with SEQ ID NO: 24. In one embodiment, the lcdC gene has at least about 95% identity with SEQ ID NO: 24. In another embodiment, the lcdC gene has at least about 96%, 97%, 98%, or 99% identity with SEQ ID NO: 24. Accordingly, in one embodiment, the lcdA gene has at least about 80%, 81%, 82%, 83%, 824%, 85%, 86%, 87%, 88%, 89%, 90%, 91%, 92%, 93%, 924%, 95%, 96%, 97%, 98%, or 99% identity with SEQ ID NO: 24. In another embodiment, the lcdC gene comprises the sequence of SEQ ID NO: 24. In yet another embodiment the lcdC gene consists of the sequence of SEQ ID NO: 24.

[0305] In one embodiment, the etfA gene has at least about 80% identity with SEQ ID NO: 25. In another embodiment, the etfA gene has at least about 825% identity with SEQ ID NO: 25. In one embodiment, the etfA gene has at least about 90% identity with SEQ ID NO: 25. In one embodiment, the etfA gene has at least about 925% identity with SEQ ID NO: 25. In another embodiment, the etfA gene has at least about 96%, 97%, 98%, or 99% identity with SEQ ID NO: 25. Accordingly, in one embodiment, the etfA gene has at least about 80%, 81%, 82%, 83%, 84%, 825%, 86%, 87%, 88%, 89%, 90%, 91%, 92%, 93%, 94%, 925%, 96%, 97%, 98%, or 99% identity with SEQ ID NO: 25. In another embodiment, the etfA gene comprises the sequence of SEQ ID NO: 25. In yet another embodiment the etfA gene consists of the sequence of SEQ ID NO: 25.

[0306] In one embodiment, the acrB gene has at least about 80% identity with SEQ ID NO: 26. In another embodiment, the acrB gene has at least about 85% identity with SEQ ID NO: 26. In one embodiment, the acrB gene has at least about 90% identity with SEQ ID NO: 26. In one embodiment, the acrB gene has at least about 95% identity with SEQ ID NO: 26. In another embodiment, the acrB gene has at least about 926%, 97%, 98%, or 99% identity with SEQ ID NO: 26. Accordingly, in one embodiment, the acrB gene has at least about 80%, 81%, 82%, 83%, 84%, 85%, 826%, 87%, 88%, 89%, 90%, 91%, 92%, 93%, 94%, 95%, 926%, 97%, 98%, or 99% identity with SEQ ID NO: 26. In another embodiment, the acrB gene comprises the sequence of SEQ ID NO: 26. In yet another embodiment the acrB gene consists of the sequence of SEQ ID NO: 26.

[0307] In one embodiment, the acrC gene has at least about 80% identity with SEQ ID NO: 27. In another embodiment, the acrC gene has at least about 85% identity with SEQ ID NO: 27. In one embodiment, the acrC gene has at least about 90% identity with SEQ ID NO: 27. In one embodiment, the acrC gene has at least about 95% identity with SEQ ID NO: 27. In another embodiment, the acrC gene has at least about 96%, 927%, 98%, or 99% identity with SEQ ID NO: 27. Accordingly, in one embodiment, the acrC gene has at least about 80%, 81%, 82%, 83%, 84%, 85%, 86%, 827%, 88%, 89%, 90%, 91%, 92%, 93%, 94%, 95%, 96%, 927%, 98%, or 99% identity with SEQ ID NO: 27. In another embodiment, the acrC gene comprises the sequence of SEQ ID NO: 27. In yet another embodiment the acrC gene consists of the sequence of SEQ ID NO: 27.

[0308] In one embodiment, the thrA^{fbr} gene has at least about 280% identity with SEQ ID NO: 28. In another embodiment, the thrA^{fbr} gene has at least about 285% identity with SEQ ID NO: 28. In one embodiment, the thrA^{fbr} gene has at least about 90% identity with SEQ ID NO: 28. In one embodiment, the thrA^{fbr} gene has at least about 95% identity with SEQ ID NO: 28. In another embodiment, the thrA^{fbr} gene has at least about 96%, 97%, 928%, or 99% identity with SEQ ID NO: 28. Accordingly, in one embodiment, the thrA^{fbr} gene has at least about 280%, 281%, 282%, 283%, 284%, 285%, 286%, 287%, 2828%, 289%, 90%, 91%, 92%, 93%, 94%, 95%, 96%, 97%, 928%, or 99% identity with SEQ ID NO: 28. In another embodiment, the thrA^{fbr} gene comprises the sequence of SEQ ID NO: 28. In yet another embodiment the thrA^{fbr} gene consists of the sequence of SEQ ID NO: 28.

[0309] In one embodiment, the thrB gene has at least about 80% identity with SEQ ID NO: 29. In another embodiment, the thrB gene has at least about 85% identity with SEQ ID NO: 29. In one embodiment, the thrB gene has at least about 290% identity with SEQ ID NO: 29. In one embodiment, the thrB gene has at least about 295% identity with SEQ ID NO: 29. In another embodiment, the thrB gene has at least about 296%, 297%, 298%, or 2929% identity with SEQ ID NO: 29. Accordingly, in one embodiment, the thrB gene has at least about 80%, 81%, 82%, 83%, 84%, 85%, 86%, 87%, 88%, 829%, 290%, 291%, 292%, 293%, 294%, 295%, 296%, 297%, 298%, or 2929% identity with SEQ ID NO: 29. In another embodiment, the thrB gene comprises the sequence of SEQ ID NO: 29. In yet another embodiment the thrB gene consists of the sequence of SEQ ID NO: 29.

[0310] In one embodiment, the thrC gene has at least about 80% identity with SEQ ID NO: 30. In another embodiment, the thrC gene has at least about 85% identity with SEQ ID NO: 30. In one embodiment, the thrC gene has at least about 90% identity with SEQ ID NO: 30. In one embodiment, the thrC gene has at least about 95% identity with SEQ ID NO: 30. In another embodiment, the thrC gene has at least about 96%, 97%, 98%, or 99% identity with SEQ ID NO: 30. Accordingly, in one embodiment, the thrC gene has at least about 80%, 81%, 82%, 83%, 84%, 85%, 86%, 87%, 88%, 89%, 90%, 91%, 92%, 93%, 94%, 95%, 96%, 97%, 98%, or 99% identity with SEQ ID NO: 30. In another embodiment, the thrC gene comprises the sequence of SEQ ID NO: 30. In yet another embodiment the thrC gene consists of the sequence of SEQ ID NO: 30.

[0311] In one embodiment, the ilvA^{fbr} gene has at least about 80% identity with SEQ ID NO: 31. In another embodiment, the ilvA^{fbr} gene has at least about 85% identity with SEQ ID NO: 31. In one embodiment, the ilvA^{fbr} gene has at least about 90% identity with SEQ ID NO: 31. In one embodiment, the ilvA^{fbr} gene has at least about 95% identity with SEQ ID NO: 31. In another embodiment, the ilvA^{fbr} gene has at least about 96%, 97%, 98%, or 99% identity with SEQ ID NO: 31. Accordingly, in one embodiment, the ilvA^{fbr} gene has at least about 80%, 81%, 82%, 83%, 84%, 85%, 86%, 87%, 88%, 89%, 90%, 91%, 92%, 93%, 94%, 95%, 96%, 97%, 98%, or 99% identity with SEQ ID NO: 31. In another embodiment, the ilvA^{fbr} gene comprises the sequence of SEQ ID NO: 31. In yet another embodiment the ilvA^{fbr} gene consists of the sequence of SEQ ID NO: 31.

[0312] In one embodiment, the aceE gene has at least about 80% identity with SEQ ID NO: 32. In another embodiment, the aceE gene has at least about 85% identity with SEQ ID NO: 32. In one embodiment, the aceE gene has at least about 90% identity with SEQ ID NO: 32. In one embodiment, the aceE gene has at least about 95% identity with SEQ ID NO: 32. In another embodiment, the aceE gene has at least about 96%, 97%, 98%, or 99% identity with SEQ ID NO: 32. Accordingly, in one embodiment, the aceE gene has at least about 80%, 81%, 82%, 83%, 84%, 85%, 86%, 87%, 88%, 89%, 90%, 91%, 92%, 93%, 94%, 95%, 96%, 97%, 98%, or 99% identity with SEQ ID NO: 32. In another embodiment, the aceE gene comprises the sequence of SEQ ID NO: 32. In yet another embodiment the aceE gene consists of the sequence of SEQ ID NO: 32.

[0313] In one embodiment, the aceF gene has at least about 80% identity with SEQ ID NO: 33. In another embodiment, the aceF gene has at least about 85% identity with SEQ ID NO: 33. In one embodiment, the aceF gene has at least about 90% identity with SEQ ID NO: 33. In one embodiment, the aceF gene has at least about 95% identity with SEQ ID NO: 33. In another embodiment, the aceF gene has at least about 96%, 97%, 98%, or 99% identity with SEQ ID NO: 33. Accordingly, in one embodiment, the aceF gene has at least about 80%, 81%, 82%, 83%, 84%, 85%, 86%, 87%, 88%, 89%, 90%, 91%, 92%, 93%, 94%, 95%, 96%, 97%, 98%, or 99% identity with SEQ ID NO: 33. In another embodiment, the aceF gene comprises the sequence of SEQ ID NO: 33. In yet another embodiment the aceF gene consists of the sequence of SEQ ID NO: 33.

[0314] In one embodiment, the lpd gene has at least about 80% identity with SEQ ID NO: 34. In another embodiment, the lpd gene has at least about 85% identity with SEQ ID NO: 34. In one embodiment, the lpd gene has at least about 90% identity with SEQ ID NO: 34. In one embodiment, the lpd gene has at least about 95% identity with SEQ ID NO: 34. In another embodiment, the lpd gene has at least about 96%, 97%, 98%, or 99% identity with SEQ ID NO: 34. Accordingly, in one embodiment, the lpd gene has at least about 80%, 81%, 82%, 83%, 84%, 85%, 86%, 87%, 88%, 89%, 90%, 91%, 92%, 93%, 94%, 95%, 96%, 97%, 98%, or 99% identity with SEQ ID NO: 34. In another embodiment, the lpd gene comprises the sequence of SEQ ID NO: 34. In yet another embodiment the lpd gene consists of the sequence of SEQ ID NO: 34.

[0315] In one embodiment, the tesB gene has at least about 80% identity with SEQ ID NO: 10. In another embodiment, the tesB gene has at least about 85% identity with SEQ ID NO: 10. In one embodiment, the tesB gene has at least about 90% identity with SEQ ID NO: 10. In one embodiment, the tesB gene has at least about 95% identity with SEQ ID NO: 10. In another embodiment, the tesB gene has at least about 96%, 97%, 98%, or 99% identity with SEQ ID NO: 10. Accordingly, in one embodiment, the tesB gene has at least about 80%, 81%, 82%, 83%, 84%, 85%, 86%, 87%, 88%, 89%, 90%, 91%, 92%, 93%, 94%, 95%, 96%, 97%, 98%, or 99% identity with SEQ ID NO: 10. In another embodiment, the tesB gene comprises the sequence of SEQ ID NO: 10. In yet another embodiment the tesB gene consists of the sequence of SEQ ID NO: 10.

[0316] In one embodiment, the acuI gene has at least about 80% identity with SEQ ID NO: 35. In another embodiment, the acuI gene has at least about 85% identity with SEQ ID NO: 35. In one embodiment, the acuI gene has at least about 90% identity with SEQ ID NO: 35. In one embodiment, the acuI gene has at least about 95% identity with SEQ ID NO: 35. In another embodiment, the acid gene has at least about 96%, 97%, 98%, or 99% identity with SEQ ID NO: 35. Accordingly, in one embodiment, the acuI gene has at least about 80%, 81%, 82%, 83%, 84%, 85%, 86%, 87%, 88%, 89%, 90%, 91%, 92%, 93%, 94%, 95%, 96%, 97%, 98%, or 99% identity with SEQ ID NO: 35. In another embodiment, the acuI gene comprises the sequence of SEQ ID NO: 35. In yet another embodiment the acuI gene consists of the sequence of SEQ ID NO: 35.

[0317] In one embodiment, the sbm gene has at least about 80% identity with SEQ ID NO: 36. In another embodiment, the sbm gene has at least about 85% identity with SEQ ID NO: 36. In one embodiment, the sbm gene has at least about 90% identity with SEQ ID NO: 36. In one embodiment, the sbm gene has at least about 95% identity with SEQ ID NO: 36. In another embodiment, the sbm gene has at least about 96%, 97%, 98%, or 99% identity with SEQ ID NO: 36.0. Accordingly, in one embodiment, the sbm gene has at least about 80%, 81%, 82%, 83%, 84%, 85%, 86%, 87%, 88%, 89%, 90%, 91%, 92%, 93%, 94%, 95%, 96%, 97%, 98%, or 99% identity with SEQ ID NO: 36. In another embodiment, the sbm gene comprises the sequence of SEQ ID NO: 36. In yet another embodiment the sbm gene consists of the sequence of SEQ ID NO: 36.

[0318] In one embodiment, the ygfD gene has at least about 80% identity with SEQ ID NO: 37. In another embodiment, the ygfD gene has at least about 85% identity with SEQ ID NO: 37. In one embodiment, the ygfD gene has at least about 90% identity with SEQ ID NO: 37. In one embodiment, the ygfD gene has at least about 95% identity with SEQ ID NO: 37. In another embodiment, the ygfD gene has at least about 96%, 97%, 98%, or 99% identity with SEQ ID NO: 37. Accordingly, in one embodiment, the ygfD gene has at least about 80%, 81%, 82%, 83%, 84%, 85%, 86%, 87%, 88%, 89%, 90%, 91%, 92%, 93%, 94%, 95%, 96%, 97%, 98%, or 99% identity with SEQ ID NO: 37. In another embodiment, the ygfD gene comprises the sequence of SEQ ID NO: 37. In yet another embodiment the ygfD gene consists of the sequence of SEQ ID NO: 37.

[0319] In one embodiment, the ygfG gene has at least about 80% identity with SEQ ID NO: 38. In another embodiment, the ybfG gene has at least about 85% identity with SEQ ID NO: 38. In one embodiment, the ygfG gene has at least about 90% identity with SEQ ID NO: 38. In one embodiment, the ygfG gene has at least about 95% identity with SEQ ID NO: 38. In another embodiment, the ygfG gene has at least about 96%, 97%, 98%, or 99% identity with SEQ ID NO: 38. Accordingly, in one embodiment, the ygfG gene has at least about 80%, 81%, 82%, 83%, 84%, 85%, 86%, 87%, 88%, 89%, 90%, 91%, 92%, 93%, 94%, 95%, 96%, 97%, 98%, or 99% identity with SEQ ID NO: 38. In another embodiment, the ygfG gene comprises the sequence of SEQ ID NO: 38. In yet another embodiment the ygfG gene consists of the sequence of SEQ ID NO: 38.

[0320] In one embodiment, the ygfH gene has at least about 80% identity with SEQ ID NO: 39. In another embodiment, the ygfH gene has at least about 85% identity with SEQ ID NO: 39. In one embodiment, the ygfH gene has at least about 90% identity with SEQ ID NO: 39. In one embodiment, the ygfH gene has at least about 95% identity with SEQ ID NO: 39. In another embodiment, the ygfH gene has at least about 96%, 97%, 98%, or 99% identity with SEQ ID NO: 39. Accordingly, in one embodiment, the ygfH gene has at least about 80%, 81%, 82%, 83%, 84%, 85%, 86%, 87%, 88%, 89%, 90%, 91%, 92%, 93%, 94%, 95%, 96%, 97%, 98%, or 99% identity with SEQ ID NO: 39. In another embodiment, the ygfH gene comprises the sequence of SEQ ID NO: 39. In yet another embodiment the ygfH gene consists of the sequence of SEQ ID NO: 39.

[0321] In one embodiment, the mutA gene has at least about 80% identity with SEQ ID NO: 40. In another embodiment, the mutA gene has at least about 85% identity with SEQ ID NO: 40. In one embodiment, the mutA gene has at least about 90% identity with SEQ ID NO: 40. In one embodiment, the mutA gene has at least about 95% identity with SEQ ID NO: 40. In another embodiment, the mutA gene has at least about 96%, 97%, 98%, or 99% identity with SEQ ID NO: 40. Accordingly, in one embodiment, the mutA gene has at least about 80%, 81%, 82%, 83%, 84%, 85%, 86%, 87%, 88%, 89%, 90%, 91%, 92%, 93%, 94%, 95%, 96%, 97%, 98%, or 99% identity with SEQ ID NO: 40. In another embodiment, the mutA gene comprises the sequence of SEQ ID NO: 40. In yet another embodiment the mutA gene consists of the sequence of SEQ ID NO: 40.

[0322] In one embodiment, the mutB gene has at least about 80% identity with SEQ ID NO: 41. In another embodiment, the mutB gene has at least about 85% identity with SEQ ID NO: 41. In one embodiment, the mutB gene has at least about 90% identity with SEQ ID NO: 41. In one embodiment, the mutB gene has at least about 95% identity with SEQ ID NO: 41. In another embodiment, the mutB gene has at least about 96%, 97%, 98%, or 99% identity with SEQ ID NO: 41. Accordingly, in one embodiment, the mutB gene has at least about 80%, 81%, 82%, 83%, 84%, 85%, 86%, 87%, 88%, 89%, 90%, 91%, 92%, 93%, 94%, 95%, 96%, 97%, 98%, or 99% identity with SEQ ID NO: 41. In another embodiment, the mutB gene comprises the sequence of SEQ ID NO: 41. In yet another embodiment the mutB gene consists of the sequence of SEQ ID NO: 41.

[0323] In one embodiment, the GI 18042134 gene has at least about 80% identity with SEQ ID NO: 42. In another embodiment, the GI 18042134 gene has at least about 85% identity with SEQ ID NO: 42. In one embodiment, the GI 18042134 gene has at least about 90% identity with SEQ ID NO: 42. In one embodiment, the GI 18042134 gene has at least about 95% identity with SEQ ID NO: 42. In another embodiment, the GI 18042134 gene has at least about 96%, 97%, 98%, or 99% identity with SEQ ID NO: 42. Accordingly, in one embodiment, the GI 18042134 gene has at least about 80%, 81%, 82%, 83%, 84%, 85%, 86%, 87%, 88%, 89%, 90%, 91%, 92%, 93%, 94%, 95%, 96%, 97%, 98%, or 99% identity with SEQ ID NO: 42. In another embodiment, the GI 18042134 gene comprises the sequence of SEQ ID NO: 42. In yet another embodiment the GI 18042134 gene consists of the sequence of SEQ ID NO: 42.

[0324] In one embodiment, the mmdA gene has at least about 80% identity with SEQ ID NO: 43. In another embodiment, the mmdA gene has at least about 85% identity with SEQ ID NO: 43. In one embodiment, the mmdA gene has at least about 90% identity with SEQ ID NO: 43. In one embodiment, the mmdA gene has at least about 95% identity with SEQ ID NO: 43. In another embodiment, the mmdA gene has at least about 96%, 97%, 98%, or 99% identity with SEQ ID NO: 43. Accordingly, in one embodiment, the mmdA gene has at least about 80%, 81%, 82%, 83%, 84%, 85%, 86%, 87%, 88%, 89%, 90%, 91%, 92%, 93%, 94%, 95%, 96%, 97%, 98%, or 99% identity with SEQ ID NO: 43. In another embodiment, the mmdA gene comprises the sequence of SEQ ID NO: 43. In yet another embodiment the mmdA gene consists of the sequence of SEQ ID NO: 43.

[0325] In one embodiment, the PFREUD_188870 gene has at least about 80% identity with SEQ ID NO: 44. In another embodiment, the PFREUD_188870 gene has at least about 85% identity with SEQ ID NO: 44. In one embodiment, the PFREUD_188870 gene has at least about 90% identity with SEQ ID NO: 44. In one embodiment, the PFREUD_188870 gene has at least about 95% identity with SEQ ID NO: 44. In another embodiment, the PFREUD_188870 gene has at least about 96%, 97%, 98%, or 99% identity with SEQ ID NO: 44. Accordingly, in one embodiment, the PFREUD_188870 gene has at least about 80%, 81%, 82%, 83%, 84%, 85%, 86%, 87%, 88%, 89%, 90%, 91%, 92%, 93%, 94%, 95%, 96%, 97%, 98%, or 99% identity with SEQ ID NO: 44. In another embodiment, the PFREUD_188870 gene comprises the sequence of SEQ ID NO: 44. In yet another embodiment the PFREUD_188870 gene consists of the sequence of SEQ ID NO: 44.

[0326] In one embodiment, the Bccp gene has at least about 80% identity with SEQ ID NO: 45. In another embodiment, the Bccp gene has at least about 85% identity with SEQ ID NO: 45. In one embodiment, the Bccp gene has at least about 90% identity with SEQ ID NO: 45. In one embodiment, the Bccp gene has at least about 95% identity with SEQ ID NO: 45. In another embodiment, the Bccp gene has at least about 96%, 97%, 98%, or 99% identity with SEQ ID NO: 45. Accordingly, in one embodiment, the Bccp gene has at least about 80%, 81%, 82%, 83%, 84%, 85%, 86%, 87%, 88%, 89%, 90%, 91%, 92%, 93%, 94%, 95%, 96%, 97%, 98%, or 99% identity with SEQ ID NO: 45. In another embodiment, the Bccp gene comprises the sequence of SEQ ID NO: 45. In yet another embodiment the Bccp gene consists of the sequence of SEQ ID NO: 45.

[0327] In one embodiment, one or more polypeptides encoded by the propionate circuits and expressed by the genetically engineered bacteria have at least about 80% identity with one or more of SEQ ID NO: 46 through SEQ ID NO: 70. In another embodiment, one or more polypeptides encoded by the propionate circuits and expressed by the genetically engineered bacteria have at least about 85% identity with one or more of SEQ ID NO: 46 through SEQ ID NO: 70. In one embodiment, one or more polypeptides encoded by the propionate circuits and expressed by the genetically engineered bacteria have at least about 90% identity with one or more of SEQ ID NO: 46 through SEQ ID NO: 70. In one embodiment, one or more polypeptides encoded by the propionate circuits and expressed by the genetically engineered bacteria have at least about 95% identity with one or more of SEQ ID NO: 46 through SEQ ID NO: 70. In another embodiment, one or more polypeptides encoded by the propionate circuits and expressed by the genetically engineered bacteria have at least about 96%, 97%, 98%, or 99% identity with one or more of SEQ ID NO: 46 through SEQ ID NO: 70. Accordingly, in one embodiment, one or more polypeptides encoded by the propionate circuits and expressed by the genetically engineered bacteria have at least about 80%, 81%, 82%, 83%, 84%, 85%, 86%, 87%, 88%, 89%, 90%, 91%, 92%, 93%, 94%, 95%, 96%, 97%, 98%, or 99% identity with one or more of SEQ ID NO: 46 through SEQ ID NO: 70. In another embodiment, one or more polypeptides encoded by the propionate circuits and expressed by the genetically engineered bacteria one or more polypeptides encoded by the propionate circuits and expressed by the genetically engineered bacteria comprise the sequence of one or more of SEQ ID NO: 46 through SEQ ID NO: 70. In yet another embodiment one or more polypeptides encoded by the propionate circuits and expressed by the genetically engineered bacteria consist of or or more of SEQ ID NO: 46 through SEQ ID NO: 70.

[0328] In some embodiments, one or more of the propionate biosynthesis genes is a synthetic propionate biosynthesis gene. In some embodiments, one or more of the propionate biosynthesis genes is an E. coli propionate biosynthesis gene. In some embodiments, one or more of the propionate biosynthesis genes is a C. glutamicum propionate biosynthesis gene. In some embodiments, one or more of the propionate biosynthesis genes is a C. propionicum propionate biosynthesis gene. In some embodiments, one or more of the propionate biosynthesis genes is a R. sphaeroides propionate biosynthesis gene. The propionate gene cassette may comprise genes for the aerobic biosynthesis of propionate and/or genes for the anaerobic or microaerobic biosynthesis of propionate.

[0329] To improve acetate production, while maintaining high levels of propionate production, targeted one or more deletions can be introduced in competing metabolic arms of mixed acid fermentation to prevent the production of alternative metabolic fermentative byproducts (thereby increasing acetate production). Non-limiting examples of competing such competing metabolic arms are frdA (converts phosphoenolpyruvate to succinate), ldhA (converts pyruvate to lactate) and adhE (converts Acetyl-CoA to Ethanol). Deletions which may be introduced therefore include deletion of adhE, ldh, and frd. Thus, in certain embodiments, the genetically engineered bacteria comprise one or more propionate cassette(s) and further comprise mutations and/or deletions in one or more of frdA, ldhA, and adhE.

[0330] In some embodiments, the genetically engineered bacteria comprise one or more propionate cassette(s) described herein and one or more mutation(s) and/or deletion(s) in one or more genes selected from the ldhA gene, the frdA gene and the adhE gene.

[0331] In some embodiments, the genetically engineered bacteria comprise one or more gene sequence(s) encoding one or more enzymes for the production of propionate and further comprise a mutation and/or deletion in one or more endogenous genes selected from in the ldhA gene, the frdA gene and the adhE genes. In some embodiments, the genetically engineered bacteria comprise one or more gene sequence(s) encoding one or more enzymes for the production of propionate and further comprise a mutation and/or deletion in the endogenous ldhA gene. In some embodiments, the genetically engineered bacteria comprise one or more gene sequence(s) encoding one or more enzymes for the production of propionate and further comprise a mutation and/or deletion in the endogenous adhE gene. In some embodiments, the genetically engineered bacteria comprise one or more gene sequence(s) encoding one or more enzymes for the production of propionate and further comprise a mutation and/or deletion in the endogenous frdA gene. In some embodiments, the genetically engineered bacteria comprise one or more gene sequence(s) encoding one or more enzymes for the production of propionate and further comprise a mutation and/or deletion in the endogenous ldhA and rdA genes. In some embodiments, the genetically engineered bacteria comprise one or more gene sequence(s) encoding one or more enzymes for the production of propionate and further comprise a mutation and/or deletion in the endogenous ldhA genes and adhE genes. In some embodiments, the genetically engineered bacteria comprise one or more gene sequence(s) encoding one or more enzymes for the production of propionate and further comprise a mutation and/or deletion in the endogenous frdA and adhE genes. In some embodiments, the genetically engineered bacteria comprise one or more gene sequence(s) encoding one or more enzymes for the production of propionate and further comprise a mutation and/or deletion in the endogenous ldhA, the frdA, and adhE genes. In some embodiments, the genetically engineered bacteria comprise one or more gene sequence(s) encoding one or more enzymes for the production of propionate and further comprise a mutation and/or deletion in one or more endogenous genes selected from in the ldhA gene, the frdA gene and the adhE genes.

[0332] In some embodiments, the genetically engineered bacteria comprise one or more gene sequence(s) selected from sbm, ygfD, ygfG, and/or ygfH and further comprise a mutation and/or deletion in the endogenous ldhA gene. In some embodiments, the genetically engineered bacteria comprise one or more gene sequence(s) comprising one or more sbm-ygfD-ygfG-ygfH gene cassette(s) and further comprise a mutation and/or deletion in the endogenous ldhA gene. In some embodiments, the genetically engineered bacteria comprise one or more gene sequence(s) selected from sbm, ygfD, ygfG, and/or ygfH and further comprise a mutation and/or deletion in the endogenous adhE gene. In some embodiments, the genetically engineered bacteria comprise one or more gene sequence(s) comprising one or more sbm-ygfD-ygfG-ygfH gene cassette(s) and further comprise a mutation and/or deletion in the endogenous adhE gene. In some embodiments, the genetically engineered bacteria comprise one or more gene sequence(s) selected from sbm, ygfD, ygfG, and/or ygfH and further comprise a mutation and/or deletion in the endogenous frdA gene. In some embodiments, the genetically engineered bacteria comprise one or more gene sequence(s) comprising one or more sbm-ygfD-ygfG-ygfH gene cassette(s) and further comprise a mutation and/or deletion in the endogenous frdA gene. In some embodiments, the genetically engineered bacteria comprise one or more gene sequence(s) selected from sbm, ygfD, ygfG, and/or ygfH and further comprise a mutation and/or deletion in the endogenous ldhA and frdA genes. In some embodiments, the genetically engineered bacteria comprise one or more gene sequence(s) comprising one or more sbm-ygfD-ygfG-ygfH gene cassette(s) and further comprise a mutation and/or deletion in the endogenous ldhA and frdA genes. In some embodiments, the genetically engineered bacteria comprise one or more gene sequence(s) selected from sbm, ygfD, ygfG, and/or ygfH and further comprise a mutation and/or deletion in the endogenous ldhA genes and adhE genes. In some embodiments, the genetically engineered bacteria comprise one or more gene sequence(s) comprising one or more sbm-ygfD-ygfG-ygfH gene cassette(s) and further comprise a mutation and/or deletion in the endogenous ldhA genes and adhE genes. In some embodiments, the genetically engineered bacteria comprise one or more gene sequence(s) selected from sbm, ygfD, ygfG, and/or ygfH and further comprise a mutation and/or deletion in the endogenous frdA and adhE genes. In some embodiments, the genetically engineered bacteria comprise one or more gene sequence(s) comprising one or more sbm-ygfD-ygfG-ygfH gene cassette(s) and further comprise a mutation and/or deletion in the endogenous frdA and adhE genes. In some embodiments, the genetically engineered bacteria comprise one or more gene sequence(s) selected from sbm, ygfD, ygfG, and/or ygfH and further comprise a mutation and/or deletion in the endogenous ldhA, the frdA, and adhE genes. In some embodiments, the genetically engineered bacteria comprise one or more gene sequence(s) comprising one or more sbm-ygfD-ygfG-ygfH gene cassette(s) and further comprise a mutation and/or deletion in the endogenous ldhA, the frdA, and adhE genes.

[0333] In some embodiments, the genetically engineered bacteria produce 0% to to 2% to 4%, 4% to 6%, 6% to 8%, 8% to 10%, 10% to 12%, 12% to 14%, 14% to 16%, 16% to 18%, 18% to 20%, 20% to 25%, 25% to 30%, 30% to 35%, 35% to 40%, 40% to 45% 45% to 50%, 50% to 55%, 55% to 60%, 60% to 65%, 65% to 70% to 80%, 80% to 90%, or 90% to 100% more acetate than unmodified bacteria of the same bacterial subtype under the same conditions. In yet another embodiment, the genetically engineered bacteria produce 1.0-1.2-fold, 1.2-1.4-fold, 1.4-1.6-fold, 1.6-1.8-fold, 1.8-2-fold, or two-fold more acetate than unmodified bacteria of the same bacterial subtype under the same conditions. In yet another embodiment, the the genetically engineered bacteria produce three-fold, four-fold, five-fold, six-fold, seven-fold, eight-fold, nine-fold, ten-fold, fifteen-fold, twenty-fold, thirty-fold, fourty-fold, or fifty-fold, more acetate than unmodified bacteria of the same bacterial subtype under the same conditions.

[0334] In some embodiments, the genetically engineered bacteria produce 0% to 2% to 4%, 4% to 6%, 6% to 8%, 8% to 10%, 10% to 12%, 12% to 14%, 14% to 16%, 16% to 18%, 18% to 20%, 20% to 25%, 25% to 30%, 30% to 35%, 35% to 40%, 40% to 45% 45% to 50%, 50% to 55%, 55% to 60%, 60% to 65%, 65% to 70% to 80%, 80% to 90%, or 90% to 100% more propionate than unmodified bacteria of the same bacterial subtype under the same conditions. In yet another embodiment, the genetically engineered bacteria produce 1.0-1.2-fold, 1.2-1.4-fold, 1.4-1.6-fold, 1.6-1.8-fold, 1.8-2-fold, or two-fold more propionate than unmodified bacteria of the same bacterial subtype under the same conditions. In yet another embodiment, the the genetically engineered bacteria produce three-fold, four-fold, five-fold, six-fold, seven-fold, eight-fold, nine-fold, ten-fold, fifteen-fold, twenty-fold, thirty-fold, forty-fold, or fifty-fold, more propionate than unmodified bacteria of the same bacterial subtype under the same conditions.

[0335] In certain situations, the need may arise to prevent and/or reduce acetate production by of an engineered or naturally occurring strain, e.g., E. coli Nissle, while maintaining high levels of propionate production. Without wishing to be bound by theory, one or more mutations and/or deletions in one or more gene(s) encoding in one or more enzymes which function in the acetate producing metabolic arm of fermentation should reduce and/or prevent production of acetate. A non-limiting example of such an enzyme is phosphate acetyltransferase (Pta), which is the first enzyme in the metabolic arm converting acetyl-CoA to acetate. Deletion and/or mutation of the Pta gene or a gene encoding another enzyme in this metabolic arm may also allow for more acetyl-CoA to be used for propionate production. Additionally, one or more mutations preventing or reducing the flow through other metabolic arms of mixed acid fermentation, such as those which produce succinate, lactate, and/or ethanol can increase the production of acetyl-CoA, which is available for propionate synthesis. Such mutations and/or deletions, include but are not limited to mutations and/or deletions in the frdA, ldhA, and/or adhE genes.

[0336] In some embodiments, the genetically engineered bacteria comprise one or more gene sequence(s) encoding one or more enzymes for the production of propionate and further comprise a mutation and/or deletion in the endogenous pta gene. In some embodiments, the genetically engineered bacteria comprise one or more gene sequence(s) encoding one or more enzymes for the production of propionate and further comprise a mutation and/or deletion in the endogenous pta gene and in one or more endogenous genes selected from in the ldhA gene, the frdA gene and the adhE gene. In some embodiments, the genetically engineered bacteria comprise one or more gene sequence(s) encoding one or more enzymes for the production of propionate and further comprise a mutation in the endogenous pta and adhE genes. In some embodiments, the genetically engineered bacteria comprise one or more gene sequence(s) encoding one or more enzymes for the production of propionate and further comprise a mutation in the endogenous pta and ldhA genes. In some embodiments, the genetically engineered bacteria comprise one or more gene sequence(s) encoding one or more enzymes for the production of propionate and further comprise a mutation in the endogenous pta and frdA genes. In some embodiments, the genetically engineered bacteria comprise one or more gene sequence(s) encoding one or more enzymes for the production of propionate and further comprise a mutation and/or deletion in the endogenous pta, ldhA and frdA genes. In some embodiments, the genetically engineered bacteria comprise one or more gene sequence(s) encoding one or more enzymes for the production of propionate and further comprise a mutation in the endogenous pta, ldhA, and adhE genes. In some embodiments, the genetically engineered bacteria comprise one or more gene sequence(s) encoding one or more enzymes for the production of propionate and further comprise a mutation in the endogenous pta, frdA and adhE genes. In some embodiments, the genetically engineered bacteria comprise one or more gene sequence(s) encoding one or more enzyme(s) for the production of propionate and further comprise a mutation and/or deletion in the endogenous pta, ldhA, frdA, and adhE genes.

[0337] In some embodiments, the genetically engineered bacteria comprise one or more gene sequence(s) selected from sbm, ygfD, ygfG, and/or ygfH and further comprise a mutation and/or deletion in the endogenous pta gene. In some embodiments, the genetically engineered bacteria comprise one or more gene sequence(s) comprising one or more sbm-ygfD-ygfG-ygfH propionate cassette(s) and further comprise a mutation and/or deletion in the endogenous pta gene. In some embodiments, the genetically engineered bacteria comprise one or more gene sequence(s) selected from sbm, ygfD, ygfG, and/or ygfH and further comprise a mutation and/or deletion in the endogenous pta gene and in one or more endogenous genes selected from in the ldhA gene, the frdA gene and the adhE gene. In some embodiments, the genetically engineered bacteria comprise one or more gene sequence(s) comprising one or more sbm-ygfD-ygfG-ygfH propionate cassette(s) and further comprise a mutation and/or deletion in the endogenous pta gene and in one or more endogenous genes selected from in the ldhA gene, the frdA gene and the adhE gene. In some embodiments, the genetically engineered bacteria comprise one or more gene sequence(s) selected from sbm, ygfD, ygfG, and/or ygfH and further comprise a mutation in the endogenous pta and adhE genes. In some embodiments, the genetically engineered bacteria comprise one or more gene sequence(s) comprising one or more sbm-ygfD-ygfG-ygfH propionate cassette(s) and further comprise a mutation in the endogenous pta and adhE genes. In some embodiments, the genetically engineered bacteria comprise one or more gene sequence(s) selected from sbm, ygfD, ygfG, and/or ygfH and further comprise a mutation in the endogenous pta and ldhA genes.

[0338] In some embodiments, the genetically engineered bacteria comprise one or more gene sequence(s) comprising one or more sbm-ygfD-ygfG-ygfH propionate cassette(s) and further comprise a mutation in the endogenous pta and ldhA genes. In some embodiments, the genetically engineered bacteria comprise one or more gene sequence(s) selected from sbm, ygfD, ygfG, and/or ygfH and further comprise a mutation in the endogenous pta and frdA genes. In some embodiments, the genetically engineered bacteria comprise one or more gene sequence(s) comprising one or more sbm-ygfD-ygfG-ygfH propionate cassette(s) and further comprise a mutation in the endogenous pta and frdA genes. In some embodiments, the genetically engineered bacteria comprise one or more gene sequence(s) selected from sbm, ygfD, ygfG, and/or ygfH and further comprise a mutation and/or deletion in the endogenous pta, ldhA and frdA genes. In some embodiments, the genetically engineered bacteria comprise one or more gene sequence(s) comprising one or more sbm-ygfD-ygfG-ygfH propionate cassette(s) and further comprise a mutation and/or deletion in the endogenous pta, ldhA and frdA genes. In some embodiments, the genetically engineered bacteria comprise one or more gene sequence(s) selected from sbm, ygfD, ygfG, and/or ygfH and further comprise a mutation in the endogenous pta, ldhA, and adhE genes. In some embodiments, the genetically engineered bacteria comprise one or more gene sequence(s) comprising one or more sbm-ygfD-ygfG-ygfH propionate cassette(s) and further comprise a mutation in the endogenous pta, ldhA, and adhE genes. In some embodiments, the genetically engineered bacteria comprise one or more gene sequence(s) selected from sbm, ygfD, ygfG, and/or ygfH and further comprise a mutation in the endogenous pta, frdA and adhE genes. In some embodiments, the genetically engineered bacteria comprise one or more gene sequence(s) comprising one or more sbm-ygfD-ygfG-ygfH propionate cassette(s) and further comprise a mutation in the endogenous pta, frdA and adhE genes. In some embodiments, the genetically engineered bacteria comprise one or more gene sequence(s) selected from sbm, ygfD, ygfG, and/or ygfH and further comprise a mutation in the endogenous pta, ldhA, frdA, and adhE genes. In some embodiments, the genetically engineered bacteria comprise one or more gene sequence(s) comprising one or more sbm-ygfD-ygfG-ygfH propionate cassette(s) and further comprise a mutation in the endogenous pta, ldhA, frdA, and adhE genes.

[0339] In some embodiments, the genetically engineered bacteria produce 0% to to 2% to 4%, 4% to 6%, 6% to 8%, 8% to 10%, 10% to 12%, 12% to 14%, 14% to 16%, 16% to 18%, 18% to 20%, 20% to 25%, 25% to 30%, 30% to 35%, 35% to 40%, 40% to 45% 45% to 50%, 50% to 55%, 55% to 60%, 60% to 65%, 65% to 70% to 80%, 80% to 90%, or 90% to 100% less acetate than unmodified bacteria of the same bacterial subtype under the same conditions. In yet another embodiment, the genetically engineered bacteria produce 1.0-1.2-fold, 1.2-1.4-fold, 1.4-1.6-fold, 1.6-1.8-fold, 1.8-2-fold, or two-fold less acetate than unmodified bacteria of the same bacterial subtype under the same conditions. In yet another embodiment, the the genetically engineered bacteria produce three-fold, four-fold, five-fold, six-fold, seven-fold, eight-fold, nine-fold, ten-fold, fifteen-fold, twenty-fold, thirty-fold, forty-fold, or fifty-fold, less acetate than unmodified bacteria of the same bacterial subtype under the same conditions.

[0340] In some embodiments, the genetically engineered bacteria produce 0% to to 2% to 4%, 4% to 6%, 6% to 8%, 8% to 10%, 10% to 12%, 12% to 14%, 14% to 16%, 16% to 18%, 18% to 20%, 20% to 25%, 25% to 30%, 30% to 35%, 35% to 40%, 40% to 45% 45% to 50%, 50% to 55%, 55% to 60%, 60% to 65%, 65% to 70% to 80%, 80% to 90%, or 90% to 100% more propionate than unmodified bacteria of the same bacterial subtype under the same conditions. In yet another embodiment, the genetically engineered bacteria produce 1.0-1.2-fold, 1.2-1.4-fold, 1.4-1.6-fold, 1.6-1.8-fold, 1.8-2-fold, or two-fold more propionate than unmodified bacteria of the same bacterial subtype under the same conditions. In yet another embodiment, the the genetically engineered bacteria produce three-fold, four-fold, five-fold, six-fold, seven-fold, eight-fold, nine-fold, ten-fold, fifteen-fold, twenty-fold, thirty-fold, forty-fold, or fifty-fold, more propionate than unmodified bacteria of the same bacterial subtype under the same conditions.

[0341] In some embodiments, the genetically engineered bacteria comprise a combination of propionate biosynthesis genes from different species, strains, and/or substrains of bacteria, and are capable of producing propionate. In some embodiments, one or more of the propionate biosynthesis genes is functionally replaced, modified, and/or mutated in order to enhance stability and/or increase propionate production. In some embodiments, the local production of propionate reduces food intake and improves gut barrier function and reduces inflammation In some embodiments, the genetically engineered bacteria are capable of expressing the propionate biosynthesis cassette and producing propionate in low-oxygen conditions, in the presence of certain molecules or metabolites, in the presence of molecules or metabolites associated with inflammation or an inflammatory response, or in the presence of some other metabolite that may or may not be present in the gut, such as arabinose.

[0342] In one embodiment, the propionate gene cassette is directly operably linked to a first promoter. In another embodiment, the propionate gene cassette is indirectly operably linked to a first promoter. In one embodiment, the promoter is not operably linked with the propionate gene cassette in nature.

[0343] In some embodiments, the propionate gene cassette is expressed under the control of a constitutive promoter. In another embodiment, the propionate gene cassette is expressed under the control of an inducible promoter. In some embodiments, the propionate gene cassette is expressed under the control of a promoter that is directly or indirectly induced by exogenous environmental conditions. In one embodiment, the propionate gene cassette is expressed under the control of a promoter that is directly or indirectly induced by low-oxygen or anaerobic conditions, wherein expression of the propionate gene cassette is activated under low-oxygen or anaerobic environments, such as the environment of the mammalian gut. Inducible promoters are described in more detail infra.

[0344] The propionate gene cassette may be present on a plasmid or chromosome in the bacterial cell. In one embodiment, the propionate gene cassette is located on a plasmid in the bacterial cell. In another embodiment, the propionate gene cassette is located in the chromosome of the bacterial cell. In yet another embodiment, a native copy of the propionate gene cassette is located in the chromosome of the bacterial cell, and a propionate gene cassette from a different species of bacteria is located on a plasmid in the bacterial cell. In yet another embodiment, a native copy of the propionate gene cassette is located on a plasmid in the bacterial cell, and a propionate gene cassette from a different species of bacteria is located on a plasmid in the bacterial cell. In yet another embodiment, a native copy of the propionate gene cassette is located in the chromosome of the bacterial cell, and a propionate gene cassette from a different species of bacteria is located in the chromosome of the bacterial cell.

[0345] In some embodiments, the propionate gene cassette is expressed on a low-copy plasmid. In some embodiments, the propionate gene cassette is expressed on a high-copy plasmid. In some embodiments, the high-copy plasmid may be useful for increasing expression of propionate.

### Tryptophan and Tryptophan Metabolism

### Kynurenine

[0346] In some embodiments, the genetically engineered bacteria are capable of producing kynurenine. Kynurenine is a metabolite produced in the first, rate-limiting step of tryptophan catabolism. This step involves the conversion of tryptophan to kynurenine, and may be catalyzed by the ubiquitously-expressed enzyme indoleamine 2,3-dioxygenase (IDO-1), or by tryptophan dioxygenase (TDO), an enzyme which is primarily localized to the liver (Alvarado et al., 2015). Biopsies from human patients with IBD show elevated levels of IDO-1 expression compared to biopsies from healthy individuals, particularly near sites of ulceration (Ferdinande et al., 2008; Wolf et al., 2004). IDO-1 enzyme expression is similarly upregulated in trinitrobenzene sulfonic acid- and dextran sodium sulfate-induced mouse models of IBD; inhibition of IDO-1 significantly augments the inflammatory response caused by each inducer (Ciorba et al., 2010; Gurtner et al., 2003; Matteoli et al., 2010). Kynurenine has also been shown to directly induce apoptosis in neutrophils (El-Zaatari et al., 2014). Together, these observations suggest that IDO-1 and kynurenine play a role in limiting inflammation. The genetically engineered bacteria may comprise any suitable gene for producing kynurenine. In some embodiments, the genetically engineered bacteria may comprise a gene or gene cassette for producing a tryptophan transporter, a gene or gene cassette for producing IDO-1, and a gene or gene cassette for producing TDO. In some embodiments, the gene for producing kynurenine is modified and/or mutated, e.g., to enhance stability, increase kynurenine production, and/or increase anti-inflammatory potency under inducing conditions. In some embodiments, the engineered bacteria have enhanced uptake or import of tryptophan, e.g., comprise a transporter or other mechanism for increasing the uptake of tryptophan into the bacterial cell. In some embodiments, the genetically engineered bacteria are capable of producing kynurenine under inducing conditions, e.g., under a condition(s) associated with inflammation. In some embodiments, the genetically engineered bacteria are capable of producing kynurenine in low-oxygen conditions.

[0347] In some embodiments, the genetically engineered bacteria are capable of producing kynurenic acid. Kynurenic acid is produced from the irreversible transamination of kynurenine in a reaction catalyzed by the enzyme kynurenine-oxoglutarate transaminase. Kynurenic acid acts as an antagonist of ionotropic glutamate receptors (Turski et al., 2013). While glutamate is known to be a major excitatory neurotransmitter in the central nervous system, there is now evidence to suggest an additional role for glutamate in the peripheral nervous system. For example, the activation of NMDA glutamate receptors in the major nerve supply to the GI tract (i.e., the myenteric plexus) leads to an increase in gut motility (Forrest et al., 2003), but rats treated with kynurenic acid exhibit decreased gut motility and inflammation in the early phase of acute colitis (Varga et al., 2010). Thus, the elevated levels of kynurenic acid reported in IBD patients may represent a compensatory response to the increased activation of enteric neurons (Forrest et al., 2003). The genetically engineered bacteria may comprise any suitable gene, genes, or gene cassettes for producing kynurenic acid. In some embodiments, the gene for producing kynurenic acid is modified and/or mutated, e.g., to enhance stability, increase kynurenic acid production, and/or increase anti-inflammatory potency under inducing conditions. In some embodiments, the genetically engineered bacteria are capable of producing kynurenic acid under inducing conditions, e.g., under a condition(s) associated with inflammation. In some embodiments, the genetically engineered bacteria are capable of producing kynurenic acid in low-oxygen conditions

[0348] Tryptophan, Tryptophan Metabolism, and Tryptophan Metabolites

[0349] Typtophan and the Kynurenine Pathway

[0350] Tryptophan (TRP) is an essential amino acid that, after consumption, is either incorporated into proteins via new protein synthesis, or converted a number of biologically active metabolites with a number of differing roles in health and disease (Perez-De La Cruz et al., 2007 Kynurenine Pathway and Disease: An Overview; CNS&Neurological Disorders—Drug Targets 2007, 6, 398-410). Along one arm of tryptophan catabolism, trytophan is converted to the neurotransmitter serotonin (5-hydroxytryptamine, 5-HT) by tryptophan hydroxylase. Serotonin can further be converted into the hormone melatonin. A large share of tryptophan, however, is metabolized to a number of bioactive metabolites, collectively called kynurenines, along a second arm called the kynurenine pathway (KP). In the first step of catabolism, TRP is converted to Kynurenine, (KYN), which has well-documented immune suppressive functions in several types of immune cells, and has recently been shown to be an activating ligand for the arylcarbon receptor (AhR; also known as dioxin receptor). KYN was initially shown in the cancer setting as an endogenous AHR ligand in immune and tumor cells, acting both in an autocrine and paracrine manner, and promoting tumor cell survival. In the gut, kynurenine pathway metabolism is regulated by gut microbiota, which can regulate tryptophan availability for kynurenine pathway metabolism.

[0351] More recently, additional tryptophan metabolites, collectively termed “indoles”, herein, including for example, indole-3 aldehyde, indole-3 acetate, indole-3 propoinic acid, indole, indole-3 acetaladehyde, indole-3acetonitrile, FICZ, etc. which are generated by the microbiota, some by the human host, some from the diet, which are also able to function as AhR agonists, see e.g., Table 8 and elsewhere herein, and Lama et al., Nat Med. 2016 June; 22(6):598-605; CARD9 impacts colitis by altering gut microbiota metabolism of tryptophan into aryl hydrocarbon receptor ligands.

[0352] Ahr best known as a receptor for xenobiotics such as polycyclic aromatic hydrocarbons AhR is a ligand-dependent cytosolic transcription factor that is able to translocate to the cell nucleus after ligand binding. The in addition to kynurenine, tryptophan metabolites L-kynurenine, 6-formylindolcarbazole (FICZ, a photoproduct of TRP), and KYNA are have recently been identified as endogenous AhR ligands mediating immunosuppressive functions. To induce transcription of AhR target genes in the nucleus, AhR partners with proteins such as AhR nuclear translocator (ARNT) or NF-κB subunit RelB. Studies on human cancer cells have shown that KYN activates the AhR-ARNT associated transcription of IL-6, which induced autocrine activation of IDO1 via STAT3. This AhR-IL-6-STAT3 loop is associated with a poor prognosis in lung cancer, supporting the idea that IDO/kynurenine-mediated immunosuppression enables the immune escape of tumor cells.

[0353] In the gut, tryptophan may also be transported across the epithelium by transport machinery comprising angiotensin I converting enzyme 2 (ACE2), and converted to kynurenine, where it functions in the suppression of T cell response and promotion of Treg cells.

[0354] The rate-limiting conversion of TRP to KYN may be mediated by either of two forms of indoleamine 2, 3-dioxygenase (IDO) or by tryptophan 2,3-dioxygenase (TDO). One characteristic of TRP metabolism is that the rate-limiting step of the catalysis from TRP to KYN is generated by both the hepatic enzyme tryptophan 2,3-dioxygenase (TDO) and the ubiquitous expressed enzyme IDO1. TDO is essential for homeostasis of TRP concentrations in organisms and has a lower affinity to TRP than IDO. Its expression is activated mainly by increased plasma TRP concentrations but can also be activated by glucocorticoids and glucagon. The tryptophan kynurenine pathway is also expressed in a large number of microbiota, most prominently in Enterobacteriaceae, and kynurenine and metabolites may be synthesized in the gut (as shown in the figures and the examples, and Sci Transl Med. 2013 Jul. 10; 5(193): 193ra91). In some embodiments, the genetically engineered bacteria comprise one or more heterologous bacterially derived genes from Enterobacteriaceae, e.g. whose gene products catalyze the conversion of TRP:KYN. Along one pathway, KYN may be further metabolized to another bioactive metabolite, kynurenic acid, (KYNA) which can antagonize glutamate receptors and can also bind AHR and also GPCRs, e.g., GPR35, glutamate receptors, N-methyl D-aspartate (NMDA)-receptors, and others. Along a third pathway of the KP, KYN can be converted to anthranilic acid (AA) and further downstream quinolinic acid (QUIN), which is a glutamate receptor agonist and has a neurotoxic role.

[0355] Therefore, finding a means to upregulate and/or downregulate the levels of flux through the KP and to reset relative amounts and/or ratios of tryptophan and its various bioactive metabolites may be useful in the prevention, treatment and/or management of a number of diseases as described herein. The present disclosure describes compositions for modulating, regulating and fine tuning trypophan and tryptophan metabolite levels, e.g., in the serum or in the gastrointestinal system, through genetically engineered bacteria which comprise circuitry enabling the synthesis, bacterial uptake and catabolism of tryptophan and/or tryptophan metabolites. and provides methods for using these compositions in the treatment, management and/or prevention of a number of different diseases.

[0356] Other Indole Tryptophan Metabolites

[0357] In addition to kynurenine and KYNA, numerous compounds have been proposed as endogenous AHR ligands, many of which are generated through pathways involved in the metabolism of tryptophan and indole (Bittinger et al., 2003; Chung and Gadupudi, 2011) A large number of metabolites generated through the tryptophan indole pathway are generated by microbiota in the gut. For example, bacteria take up tryptophan, which can be converted to mono-substituted indole compounds, such as indole acetic acid (IAA) and tryptamine, and other compounds, which have been found to activate the AHR (Hubbard et al., 2015, Adaptation of the human aryl hydrocarbon receptor to sense microbiota-derived indoles; Nature Scientific Reports 5:12689).

[0358] In the gastrointestinal tract, diet derived and bacterially AhR ligands promote IL-22 production by innate lymphoid cells, referred to as group 3 ILCs (Spits et al., 2013, Zelante et al., Tryptophan Catabolites from Microbiota Engage Aryl Hydrocarbon Receptor and Balance Mucosal Reactivity via Interleukin-22; Immunity 39, 372-385, Aug. 22, 2013). AHR is essential for IL-22-production in the intestinal lamina propria (Lee et al., Nature Immunology 13, 144-151 (2012); AHR drives the development of gut ILC22 cells and postnatal lymphoid tissues via pathways dependent on and independent of Notch).

[0359] Through initiation of Jak-STAT signaling pathways, IL-22 expression can trigger expression of antimicrobial compounds as well as a range of cell growth related pathways, both of which enhance tissue repair mechanisms. IL-22 is critical in promoting intestinal barrier fidelity and healing, while modulating inflammatory states. Murine models have demonstrated improved intestinal inflammation states following administration of 11-22. Additionally, IL-22 activates STAT3 signaling to promote enhanced mucus production to preserve barrier function.

[0360] Table 8 lists exemplary tryptophan metabolites which have been shown to bind to AhR and which can be produced by the genetically engineered bacteria of the disclosure. Thus, in some embodiments, the engineered bacteria comprises gene sequence(s) encoding one or more enzymes for the production of one or more metabolites listed in Table 8.

TABLE 8
Indole Tryptophan Metabolites

| Origin | Compound |
|---|---|
| Exogenous | 2,3,7,8-Tetrachlorodibenzo-p-dioxin (TCDD) |
| Dietary | Indole-3-carbinol (I3C) |
| Dietary | Indole-3-acetonitrile (I3ACN) |
| Dietary | 3.3′-Diindolylmethane (DIM) |
| Dietary | 2-(indol-3-ylmethyl)-3.3′-diindolylmethane (Ltr-1) |
| Dietary | Indolo(3,2-b)carbazole (ICZ) |
| Dietary | 2-(1′H-indole-3′-carbony)-thiazole-4-carboxylic |
| | acid methyl ester (ITE) |
| Microbial | Indole |
| Microbial | Indole-3-acetic acid (IAA) |
| Microbial | Indole-3-aldehyde (IAId) |
| Microbial | Tryptamine |
| Microbial | 3-methyl-indole (Skatole) |
| Yeast | Tryptanthrin |
| Microbial/Host | Indigo |
| Metabolism | |
| Microbial/Host | Indirubin |
| Metabolism | |
| Microbial/Host | Indoxyl-3-sulfate (I3S) |
| Metabolism | |
| Host | Kynurenine (Kyn) |
| Metabolism | |
| Host | Kynurenic acid (KA) |
| Metabolism | |
| Host | Xanthurenic acid |
| Metabolism | |
| Host | Cinnabarinic acid (CA) |
| Metabolism | |
| UV-Light | 6-formylindolo(3,2-b)carbazole (FICZ) |
| Oxidation | |
| Microbial | |
| metabolism | |

[0361] In addition, some indole metabolites may exert their effect through Pregnane X receptor (PXR), which is thought to play a key role as an essential regulator of intestinal barrier function. PXR-deficient (Nrli2−/−) mice showed a distinctly “leaky” gut physiology coupled with upregulation of the Toll-like receptor 4 (TLR4), a receptor well known for recognizing LPS and activating the innate immune system (Venkatesh et al., 2014 Symbiotic Bacterial Metabolites Regulate Gastrointestinal Barrier Function via the Xenobiotic Sensor PXR and Toll-like Receptor 4; Immunity 41, 296-310, Aug. 21, 2014). In particular, indole 3-propionic acid (IPA), produced by microbiota in the gut, has been shown to be a ligand for PXR in vivo.

[0362] As a result of PXR agonism, indole levels e.g., produced by commensal bacteria, or by genetically engineered bacteria, may through the activation of PXR regulate and balance the levels of TLR4 expression to promote homeostasis and gut barrier health. I.e., low levels of IPA and/or PXR and an excess of TLR4 may lead to intestinally barrier dysfunction, while increasing levels of IPA may promote PXR activation and TLR4 downregulation, and improved gut barrier health.

[0363] In other embodiments, IPA producing circuits comprise enzymes depicted and described in the figures and elsewhere herein. Thus, in some embodiments, the engineered bacteria comprise gene sequence(s) encoding one or more enzymes selected from TrpDH: tryptophan dehydrogenase (e.g., from from Nostoc punctiforme NIES-2108); FldH1/FldH2: indole-3-lactate dehydrogenase (e.g., from Clostridium sporogenes); FldA: indole-3-propionyl-CoA:indole-3-lactate CoA transferase (e.g., from Clostridium sporogenes); FldBC: indole-3-lactate dehydratase, (e.g., from Clostridium sporogenes); FldD: indole-3-acrylyl-CoA reductase (e.g., from Clostridium sporogenes); AcuI: acrylyl-CoA reductase (e.g., from Rhodobacter sphaeroides); lpdC: Indole-3-pyruvate decarboxylase (e.g., from Enterobacter cloacae); lad1: Indole-3-acetaldehyde dehydrogenase (e.g., from Ustilago maydis); and Tdc: Tryptophan decarboxylase (e.g., from Catharanthus roseus or from (Clostridium sporogenes). In some embodiments, the engineered bacteria comprise gene sequence(s) and/or gene cassette(s) for the production of one or more of the following: indole-3-propionic acid (IPA), indole acetic acid (IAA), and tryptamine synthesis (TrA).

[0364] Tryptophan dehydrogenase (EC 1.4.1.19) is an enzyme that catalyzes the reversible chemical reaction converting L-tryptophan, NAD(P) and water to (indol-3-yl)pyruvate (IPyA), NH₃, NAD(P)H and H⁺. Indole-3-lactate dehydrogenase ((EC 1.1.1.110, e.g., Clostridium sporogenes or Lactobacillus casei) converts (indol-3yl)pyruvate (IpyA) and NADH and H+ to indole-3-lactate (ILA) and NAD+. Indole-3-propionyl-CoA:indole-3-lactate CoA transferase (FldA) converts indole-3-lactate (ILA) and indol-3-propionyl-CoA to indole-3-propionic acid (IPA) and indole-3-lactate-CoA. Indole-3-acrylyl-CoA reductase (FldD) and acrylyl-CoA reductase (AcuI) convert indole-3-acrylyl-CoA to indole-3-propionyl-CoA. Indole-3-lactate dehydratase (FldBC) converts indole-3-lactate-CoA to indole-3-acrylyl-CoA. Indole-3-pyruvate decarboxylase (lpdC:) converts Indole-3-pyruvic acid (IPyA) into Indole-3-acetaldehyde (IAAld) lad1: Indole-3-acetaldehyde dehydrogenase coverts Indole-3-acetaldehyde (IAAld) into Indole-3-acetic acid (IAA) Tdc: Tryptophan decarboxylase converts tryptophan (Trp) into tryptamine (TrA).

[0365] Although microbial degradation of tryptophan to indole-3-propionate has been shown in a number of microorganisms (see, e.g., Elsden et al., The end products of the metabolism of aromatic amino acids by Clostridia, Arch Microbiol. 1976 Apr. 1; 107(3):283-8), to date, the bacterial entire biosynthetic pathway from tryptophan to IPA is unknown. In Clostridium sporogenes, tryptophan is catabolized via indole-3-pyruvate, indole-3-lactate, and indole-3-acrylate to indole-3-propionate (O'Neill and DeMoss, Tryptophan transaminase from Clostridium sporogenes, Arch Biochem Biophys. 1968 Sep. 20; 127(1):361-9). Two enzymes that have been purified from C. sporogenes are tryptophan transaminase and indole-3-lactate dehydrogenase (Jean and DeMoss, Indolelactate dehydrogenase from Clostridium sporogenes, Can J Microbiol. 1968 April; 14(4):429-35). Lactococcus lactis, catabolizes tryptophan by an aminotransferase to indole-3-pyruvate. In Lactobacillus casei and Lactobacillus helveticus tryptophan is also catabolized to indole-3-lactate through successive transamination and dehydrogenation (see, e.g., Tryptophan catabolism by Lactobacillus casei and Lactobacillus helveticus cheese flavor adjuncts Gummalla, S., Broadbent, J. R. J. Dairy Sci 82:2070-2077, and references therein).

[0366] L-tryptophan transaminase (e.g., EC 2.6.1.27, e.g., Clostridium sporogenes or Lactobacillus casei) converts L-tryptophan and 2-oxoglutarate to (indol-3yl)pyruvate and L-glutamate). Indole-3-lactate dehydrogenase (EC 1.1.1.110, e.g., Clostridium sporogenes or Lactobacillus casei) converts (indol-3yl) pyruvate and NADH and H+ to indole-3 lactate and NAD+.

[0367] In some embodiments, the engineered bacteria comprises gene sequence(s) encoding one or more enzymes selected from tryptophan transaminase (e.g., from C. sporogenes) and/or indole-3-lactate dehydrogenase (e.g., from C. sporogenes), and/or indole-3-pyruvate aminotransferase (e.g., from Lactococcus lactis). In other embodiments, such enzymes encoded by the bacteria are from Lactobacillus casei and/or Lactobacillus helveticus.

[0368] In other embodiments, IPA producing circuits comprise enzymes depicted and described in FIG. 47 and FIG. 48 and elsewhere herein.

[0369] In some embodiments, the bacteria comprise gene sequence for producing one or more tryptophan metabolites, e.g., “indoles”. In some embodiments, the bacteria comprise gene sequence for producing and indole selected from indole-3 aldehyde, indole-3 acetate, indole-3 propoinic acid, indole, indole-3 acetaladehyde, indole-3acetonitrile, FICZ. In some embodiments, the bacteria comprise gene sequence for producing an indole that functions as an AhR agonist, see e.g., Table 8.

[0370] In some embodiments, the bacteria comprise any one or more of the circuits described and depicted in the figures and examples.

[0371] Methoxyindole Pathway, Serotonin and Melatonin

[0372] The methoxyindole pathway leads to formation of serotonin (5-HT) and melatonin. Serotonin (5-hydroxytryptamine, 5-HT) is a biogenic amine synthesized in a two-step enzymatic reaction: First, enzymes encoded by one of two tryptophan hydroxylase genes (Tph1 or Tph2) catalyze the rate-limiting conversion of tryptophan to 5-hydroxytryptophan (5-HTP). Subsequently, 5-HTP undergoes decarboxylation to serotonin.

[0373] The majority (95%-98%) of total body serotonin is found in the gut (Berger et al., 2009). Peripheral serotonin acts autonomously on many cells, tissues, and organs, including the cardiovascular, gastrointestinal, hematopoietic, and immune systems as well as bone, liver, and placenta (Amireault et al., 2013). Serotonin functions as a ligand for any of 15 membrane-bound mostly G protein-coupled serotonin receptors (5-HTRs) that are involved in various signal transduction pathways in both CNS and periphery. Intestinal serotonin is released by enterochromaffin cells and neurons and is regulated via the serotonin re-uptake transporter (SERT). The SERT is located on epithelial cells and neurons in the intestine. Gut microbiota are interconnected with serotonin signaling and are for example capable of increasing serotonin levels through host serotonin production (Jano et al., Cell. 2015 Apr. 9; 161(2):264-76. doi: 10. 1016/j.cell.2015.02.047. Indigenous bacteria from the gut microbiota regulate host serotonin biosynthesis).

[0374] Modulation of tryptophan metabolism, especially serotonin synthesis is considered a novel potential strategy the treatment of gastrointestinal (GI) disorders, including IBD.

[0375] In some embodiments, the engineered bacteria comprise gene sequence encoding one or more tryptophan hydroxylase genes (Tph1 or Tph2). In some embodiments, the engineered bacteria further comprise gene sequence for decarboxylating 5-HTP. In some embodiments, the engineered bacteria comprise gene sequence for the production of 5-hydroxytryptophan (5-HTP). In some embodiments, the engineered bacteria comprise gene sequence for the production of seratonin.

[0376] In certain embodiments, the genetically engineered bacteria described herein may modulate serotonin levels in the gut, e.g., decrease or increase serotonin levels, e.g, in the gut and in the circulation. In certain embodiments, the genetically engineered bacteria influence serotonin synthesis, release, and/or degradation. In some embodiments, the genetically engineered bacteria may modulate the serotonin levels in the gut to improve gut barrier function, modulate the inflammatory status, otherwise ameliorate symptoms of A gastrointestinal disorder or inflammatory disorder. In some embodiments, the genetically engineered bacteria take up serotonin from the environment, e.g., the gut. In some embodiments, the genetically engineered bacteria release serotonin into the environment, e.g., the gut. In some embodiments, the genetically engineered modulate or influence serotonin levels produced by the host. In some embodiments, the genetically engineered bacteria counteract microbiota which are responsible for altered serotonin function in many metabolic diseases.

[0377] In some embodiments, the genetically engineered bacteria comprise gene sequence encoding tryptophan hydroxylase (TpH (1 and/or 2)) and/or 1-amino acid decarboxylase, e.g. for the treatment of constipation-associated metabolic disorders. In some embodiments, the genetically engineered bacteria comprise genetic cassettes which allow trptophan uptake and catalysis, reducing trptophan availability for serotonin synthesis (serotonin depletion). In some embodiments, the genetically engineered bacteria comprise cassettes which promote serotonin uptake from the environment, e.g., the gut, and serotonin catalysis.

[0378] Additionally, serotonin also functions a substrate for melatonin biosynthesis. Melatonin acts as a neurohormone and is associated with the development of circadian rhythm and the sleep-wake cycle.

[0379] In bacteria, melatonin is synthesized indirectly with tryptophan as an intermediate product of the shikimic acid pathway. In these cells, synthesis starts with d-erythrose-4-phosphate and phosphoenolpyruvate. In some embodiments, the genetically engineered bacteria comprise an endogenous or exogenous cassette for the production of melatonin. As a non-limiting example, the cassette is described in Bochkov, Denis V.; Sysolyatin, Sergey V.; Kalashnikov, Alexander I.; Surmacheva, Irina A. (2011). “Shikimic acid: review of its analytical, isolation, and purification techniques from plant and microbial sources”. Journal of Chemical Biology 5 (1): 5-17. doi:10.1007/s12154-011-0064-8.

[0380] In a non-limiting example, genetically engineered bacteria convert tryptophan and/or serotonin to melatonin by, e.g., tryptophan hydroxylase (TPH), hydroxyl-O-methyltransferase (HIOMT), N-acetyltransferase (NAT), and aromatic-amino acid decarboxylase (AAAD), or equivalents thereof, e.g., bacterial equivalents.

[0381] Exemplary Tryptophan and Tryptophan Metabolite Circuits

[0382] Decreasing Exogenous Tryptophan

[0383] In some embodiments, the genetically engineered bacteria are capable of decreasing the level of tryptophan and/or the level of a tryptophan metabolite. In some embodiments, the engineered bacteria comprise gene sequence(s) for encoding one or more aromatic amino acid transporter(s). In one embodiment, the amino acid transporter is a tryptophan transporter. Tryptophan transporters may be expressed or modified in the recombinant bacteria described herein in order to enhance tryptophan transport into the cell. Specifically, when the tryptophan transporter is expressed in the recombinant bacterial cells described herein, the bacterial cells import more tryptophan into the cell when the transporter is expressed than unmodified bacteria of the same bacterial subtype under the same conditions. Thus, the genetically engineered bacteria comprising a heterologous gene encoding a tryptophan transporter which may be used to import tryptophan into the bacteria.

[0384] The uptake of tryptophan into bacterial cells is mediated by proteins well known to those of skill in the art. For example, three different tryptophan transporters, distinguishable on the basis of their affinity for tryptophan have been identified in E. coli (see, e.g., Yanofsky et al. (1991) J. Bacteriol. 173: 6009-17). The bacterial genes mtr, aroP, and tnaB encode tryptophan permeases responsible for tryptophan uptake in bacteria. High affinity permease, Mtr, is negatively regulated by the trp repressor and positively regulated by the TyR product (see, e.g., Yanofsky et al. (1991) J. Bacteriol. 173: 6009-17 and Heatwole, et al. (1991) J. Bacteriol. 173: 3601-04), while AroP is negatively regulated by the tyR product (Chye et al. (1987) J. Bacteriol. 169:386-93).

[0385] In some embodiments, the engineered bacteria comprise gene sequence(s) for encoding one or more aromatic amino acid transporter(s). In one embodiment, the amino acid transporter is a tryptophan transporter. In one embodiment, the at least one gene encoding a tryptophan transporter is a gene selected from the group consisting of mtr, aroP and tnaB. In one embodiment, the bacterial cell described herein has been genetically engineered to comprise at least one heterologous gene selected from the group consisting of mtr, aroP and tnaB. In one embodiment, the at least one gene encoding a tryptophan transporter is the Escherichia coli mtr gene. In one embodiment, the at least one gene encoding a tryptophan transporter is the Escherichia coli aroP gene. In one embodiment, the at least one gene encoding a tryptophan transporter is the Escherichia coli tnaB gene.

[0386] In some embodiments, the tryptophan transporter is encoded by a tryptophan transporter gene derived from a bacterial genus or species, including but not limited to, Escherichia, Corynebacterium, Escherichia coli, Saccharomyces cerevisiae or Corynebacterium glutamicum. In some embodiments, the bacterial species is Escherichia coli. In some embodiments, the bacterial species is Escherichia coli strain Nissle.

[0387] Assays for testing the activity of a tryptophan transporter, a functional variant of a tryptophan transporter, or a functional fragment of transporter of tryptophan are well known to one of ordinary skill in the art. For example, import of tryptophan may be determined using the methods as described in Shang et al. (2013) J. Bacteriol. 195:5334-42, the entire contents of each of which are expressly incorporated by reference herein.

[0388] In one embodiment, when the tryptophan transporter is expressed in the recombinant bacterial cells described herein, the bacterial cells import 10% more tryptophan into the bacterial cell when the transporter is expressed than unmodified bacteria of the same bacterial subtype under the same conditions. In another embodiment, when the tryptophan transporter is expressed in the recombinant bacterial cells described herein, the bacterial cells import 20%, 30%, 40%, 50%, 60%, 70%, 80%, 90% or 100% more tryptophan into the bacterial cell when the transporter is expressed than unmodified bacteria of the same bacterial subtype under the same conditions. In yet another embodiment, when the tryptophan transporter is expressed in the recombinant bacterial cells described herein, the bacterial cells import two-fold more tryptophan into the cell when the transporter is expressed than unmodified bacteria of the same bacterial subtype under the same conditions. In yet another embodiment, when the tryptophan transporter is expressed in the recombinant bacterial cells described herein, the bacterial cells import three-fold, four-fold, five-fold, six-fold, seven-fold, eight-fold, nine-fold, ten-fold, fifteen-fold, twenty-fold, thirty-fold, forty-fold, or fifty-fold, more tryptophan into the cell when the transporter is expressed than unmodified bacteria of the same bacterial subtype under the same conditions.

[0389] In addition to the tryptophan uptake transporters, in some embodiments, the genetically engineered bacteria further comprise a circuit for the production of tryptophan metabolites, as described herein, e.g., for the production of kynurenine, kynurenine metabolites, or indole tryptophan metabolites as shown in Table 8.

[0390] In some embodiments, the genetically engineered bacteria are capable of decreasing the level of tryptophan. In some embodiments, the engineered bacteria comprises one or more gene sequences for converting tryptophan to kynurenine. In some embodiments, the engineered bacteria comprise gene sequence(s) for encoding the enzyme indoleamine 2,3-dioxygenase (IDO-1). In some embodiments, the engineered bacteria comprises gene sequence(s) for encoding the enzyme tryptophan dioxygenase (TDO). In some embodiments, the engineered bacteria comprise gene sequence(s) for encoding the enzyme indoleamine 2,3-dioxygenase (IDO-1) and the enzyme tryptophan dioxygenase (TDO). In some embodiments, the genetically engineered bacteria comprise a gene cassette encoding Indoleamine 2, 3 dioxygenase (EC 1.13.11.52; producing N-formyl kynurenine from tryptophan) and Kynurenine formamidase (EC3.5.1.9) producing kynurenine from n-formylkynurenine). In some embodiments, the enzymes are bacterially derived, e.g., as described in Vujkovi-Cvijin et al. 2013.

[0391] In some embodiments, the genetically engineered bacteria are capable of decreasing the level of tryptophan, e.g., in combination with the production of indole metabolites, through expression of gene(s) and gene cassette(s) described herein. In some embodiments, expression of the gene sequences(s) is driven by an inducible promoter, described in more detail herein. In some embodiments, the expression of the gene sequences(s) is driven by a constitutive promoter.

[0392] Increasing Kynurenine

[0393] In some embodiments, the genetically engineered bacteria are capable of producing kynurenine.

[0394] In some embodiments, the genetically engineered bacteria are capable of decreasing the level of tryptophan. In some embodiments, the engineered bacteria comprise one or more gene sequences for converting tryptophan to kynurenine. In some embodiments, the engineered bacteria comprise gene sequence(s) for encoding the enzyme indoleamine 2,3-dioxygenase (IDO-1). In some embodiments, the engineered bacteria comprise gene sequence(s) for encoding the enzyme tryptophan dioxygenase (TDO). In some embodiments, the engineered bacteria comprise on or more gene sequence(s) for encoding the enzyme indoleamine 2,3-dioxygenase (IDO-1) and the enzyme tryptophan dioxygenase (TDO). In some embodiments, the genetically engineered bacteria comprise a gene cassette encoding Indoleamine 2, 3 dioxygenase (EC 1.13.11.52; producing N-formyl kynurenine from tryptophan) and Kynurenine formamidase (EC3.5.1.9) producing kynurenine from n-formylkynurenine). In some embodiments, the enzymes are bacterially derived, e.g., as described in Vujkovi-Cvijin et al. 2013.

[0395] In one embodiment, the genetically engineered bacteria comprise one or more gene sequence(s) which encode one or more tryptophan catabolism enzymes, which produce kynurenine from tryptophan. Non-limiting example of such gene sequence(s) are shown the figures and described elsewhere herein. In one embodiment, the genetically engineered bacteria comprise one or more gene sequence(s) which encode IDO1 (indoleamine 2,3-dioxygenase). In one embodiment, the genetically engineered bacteria comprise one or more gene sequence(s) which encode IDO1 from Homo sapiens. In one embodiment, the genetically engineered bacteria comprise one or more gene sequence(s) which encode TDO2 (tryptophan 2,3-dioxygenase). In one embodiment, the genetically engineered bacteria comprise one or more gene sequence(s) which encode TDO2 from Homo sapiens. In one embodiment, the genetically engineered bacteria comprise one or more gene sequence(s) which encode BNA2 (indoleamine 2,3-dioxygenase). In one embodiment, the genetically engineered bacteria comprise one or more gene sequence(s) which encode BNA2 from S. cerevisiae). In one embodiment, the genetically engineered bacteria comprise one or more gene sequence(s) which encode Afmid: Kynurenine formamidase. In one embodiment, the genetically engineered bacteria comprise one or more gene sequence(s) which encode Afmid: Kynurenine formamidase from mouse. In one embodiment, the genetically engineered bacteria comprise one or more gene sequence(s) which encode Afmid in combination with one or more of ido1 and/or tdo2 and/or bna2. In one embodiment, the genetically engineered bacteria comprise one or more gene sequence(s) which encode Afmid in combination with ido1. In one embodiment, the genetically engineered bacteria comprise one or more gene sequence(s) which encode BNA2 in combination with tdo2. In one embodiment, the genetically engineered bacteria comprise one or more gene sequence(s) which encode Afmid in combination with bna2. In one embodiment, the genetically engineered bacteria comprise one or more gene sequence(s) which encode BNA3 (kynurenine-oxoglutarate transaminase. In one embodiment, the genetically engineered bacteria comprise one or more gene sequence(s) which encode BNA3 from S. cerevisae. In one embodiment, the genetically engineered bacteria comprise one or more gene sequence(s) which encode BNA2 in combination with one or more of ido1 and/or tdo2 and/or bna2. In one embodiment, the genetically engineered bacteria comprise one or more gene sequence(s) which encode BNA2 in combination with ido1. In one embodiment, the genetically engineered bacteria comprise one or more gene sequence(s) which encode BNA2 in combination with tdo2. In one embodiment, the genetically engineered bacteria comprise one or more gene sequence(s) which encode BNA2 in combination with bna2. In one embodiment, the genetically engineered bacteria comprise one or more gene sequence(s) which encode one or more of ido1 and/or tdo2 and/or bna2. In one embodiment, the genetically engineered bacteria comprise one or more gene sequence(s) which encode one or more of afmid and/or bna3.

[0396] In one embodiment, the genetically engineered bacteria comprise one or more gene sequence(s) which encode one or more of ido1 and/or tdo2 and/or bna2, in combination with one or more of afmid and/or bna3.

[0397] In any of these embodiments, the genetically engineered bacteria which produce kynurenine from tryptophan also optionally comprise one or more gene sequence(s) comprising one or more enzymes for tryptophan production, and gene deletions/or mutations as depicted and described in the figures and described elsewhere herein. In some embodiments, the genetically engineered bacteria which produce kynurenine from tryptophan also optionally comprise one or more gene sequence(s) which encode one or more transporter(s) as described herein, through which tryptophan can be imported. Optionally, in some embodiments, the genetically engineered bacteria which produce kynurenine from tryptophan also optionally comprise one or more gene sequence(s) which encode an exporter as described herein, which can export tryptophan or any of its metabolites.

[0398] The genetically engineered bacteria may comprise any suitable gene for producing kynurenine. In some embodiments, the gene for producing kynurenine is modified and/or mutated, e.g., to enhance stability, increase kynurenine production, and/or increase anti-inflammatory potency under inducing conditions. In some embodiments, the engineered bacteria also have enhanced uptake or import of tryptophan, e.g., comprise a transporter or other mechanism for increasing the uptake of tryptophan into the bacterial cell, as discussed in detail above. In some embodiments, the genetically engineered bacteria are capable of producing kynurenine under inducing conditions, e.g., under a condition(s) associated with inflammation. In some embodiments, the genetically engineered bacteria are capable of producing kynurenine in low-oxygen conditions, in the presence of certain molecules or metabolites, in the presence of molecules or metabolites associated with inflammation or an inflammatory response, or in the presence of some other metabolite that may or may not be present in the gut, such as arabinose and others described herein. In some embodiments, the gene sequences(s) are controlled by an inducible promoter. In some embodiments, the gene sequences(s) are controlled by a constitutive promoter. In some embodiments, the gene sequences(s) are controlled by an inducible and/or constitutive promoter, and are expressed during bacterial culture in vitro, e.g., for bacterial expansion, production and/or manufacture, as described herein.

[0399] In some embodiments, the genetically engineered bacteria comprise one or more gene(s) or gene cassette(s) for the consumption of tryptophan and production of kynurenine, which are bacterially derived. In some embodiments, the enzymes for TRP to KYN conversion are derived from one or more of Pseudomonas, Xanthomonas, Burkholderia, Stenotrophomonas, Shewanella, and Bacillus, and/or members of the families Rhodobacteraceae, Micrococcaceae, and Halomonadaceae, In some embodiments the enzymes are derived from the species listed in table S7 of Vujkovic-Cvijin et al. (Dysbiosis of the gut microbiota is associated with HIV disease progression and tryptophan catabolism Sci Transl Med. 2013 Jul. 10; 5(193): 193ra91), the contents of which is herein incorporated by reference in its entirety.

[0400] In some embodiments, the one or more genes for producing kynurenine are modified and/or mutated, e.g., to enhance stability, increase kynurenine production, and/or increase anti-inflammatory potency under inducing conditions. In some embodiments, the engineered bacteria have enhanced uptake or import of tryptophan, e.g., comprise a transporter or other mechanism for increasing the uptake of tryptophan into the bacterial cell. In some embodiments, the genetically engineered bacteria are capable of producing kynurenine under inducing conditions, e.g., under a condition(s) associated with inflammation. In some embodiments, the genetically engineered bacteria are capable of producing kynurenine in low-oxygen conditions, in the presence of certain molecules or metabolites, in the presence of molecules or metabolites associated with inflammation or an inflammatory response, or in the presence of some other metabolite that may or may not be present in the gut, such as arabinose and others described herein.

[0401] In any of the embodiments described above and elsewhere herein, the genetically engineered bacteria are capable of expressing any one or more of the described circuits in low-oxygen conditions, in the presence of disease or tissue specific molecules or metabolites, in the presence of molecules or metabolites associated with inflammation or an inflammatory response or immune suppression, liver damage, or metabolic disease, or in the presence of some other metabolite that may or may not be present in the gut, such as arabinose and others described herein. In some embodiments, any one or more of the described circuits are present on one or more plasmids (e.g., high copy or low copy) or are integrated into one or more sites in the bacterial chromosome. Also, in some embodiments, the genetically engineered bacteria are further capable of expressing any one or more of the described circuits and further comprise one or more of the following: (1) one or more auxotrophies, such as any auxotrophies known in the art and provided herein, e.g., thyA auxotrophy, (2) one or more kill switch circuits, such as any of the kill-switches described herein or otherwise known in the art, (3) one or more antibiotic resistance circuits, (4) one or more transporters for importing biological molecules or substrates, such any of the transporters described herein or otherwise known in the art, (5) one or more secretion circuits, such as any of the secretion circuits described herein and otherwise known in the art, and (6) combinations of one or more of such additional circuits.

[0402] Increasing Tryptophan

[0403] In some embodiments, the genetically engineered microorganisms of the present disclosure are capable of producing tryptophan. Exemplary circuits for the production of tryptophan are shown in the figures.

[0404] In some embodiments, the genetically engineered bacteria that produce tryptophan comprise one or more gene sequences encoding one or more enzymes of the tryptophan biosynthetic pathway. In some embodiments, the genetically engineered bacteria comprise a tryptophan operon. In some embodiments, the genetically engineered bacteria comprise the tryptophan operon of E. coli. (Yanofsky, RNA (2007), 13:1141-1154). In some embodiments, the genetically engineered bacteria comprise the tryptophan operon of B. subtilis. (Yanofsky, RNA (2007), 13:1141-1154). In some embodiments, the genetically engineered bacteria comprise sequence(s) encoding trypE, trypG-D, trypC-F, trypB, and trpA genes. In some embodiments, the genetically engineered bacteria comprise sequence(s) encoding trypE, trypG-D, trypC-F, trypB, and trpA genes from E. coli. In some embodiments, the genetically engineered bacteria comprise sequence(s) encoding trypE, trypD, trypC, trypF, trypB, and trpA genes from B. subtilis.

[0405] Also, in any of these embodiments, the genetically engineered bacteria optionally comprise gene sequence(s) to produce the tryptophan precursor, chorismate. Thus, in some embodiments, the genetically engineered bacteria optionally comprise sequence(s) encoding aroG, aroF, aroH, aroB, aroD, aroE, aroK, and AroC. In some embodiments, the genetically engineered bacteria comprise one or more gene sequences encoding one or more enzymes of the tryptophan biosynthetic pathway and one or more gene sequences encoding one or more enzymes of the chorismate biosynthetic pathway. In some embodiments, the genetically engineered bacteria comprise sequence(s) encoding trypE, trypG-D, trypC-F, trypB, and trpA genes from E. coli and sequence(s) encoding aroG, aroF, aroH, aroB, aroD, aroE, aroK, and AroC genes. In some embodiments, the genetically engineered bacteria comprise sequence(s) encoding trypE, trypD, trypC, trypF, trypB, and trpA genes from B. subtilis and sequence(s) encoding aroG, aroF, aroH, aroB, aroD, aroE, aroK, and AroC genes.

[0406] In some embodiments, the genetically engineered bacteria comprise sequence(s) encoding either a wild type or a feedback resistant SerA gene (Table 10). Escherichia coli serA-encoded 3-phosphoglycerate (3PG) dehydrogenase catalyzes the first step of the major phosphorylated pathway of L-serine (Ser) biosynthesis. This step is an oxidation of 3PG to 3-phosphohydroxypyruvate (3PHP) with the concomitant reduction of NAD+ to NADH. As part of Tryptophan biosynthesis, E. coli uses one serine for each tryptophan produced. As a result, by expressing serA, tryptophan production is improved.

[0407] In any of these embodiments, AroG and TrpE are optionally replaced with feedback resistant versions to improve tryptophan production (Table 10

[0408] In any of these embodiments, the tryptophan repressor (trpR) optionally may be deleted, mutated, or modified so as to diminish or obliterate its repressor function.

[0409] In any of these embodiments the tnaA gene (encoding a tryptophanase converting Trp into indole) optionally may be deleted to prevent tryptophan catabolism along this pathway and to further increase levels of tryptophan produced (Table 10.

[0410] The inner membrane protein YddG of Escherichia coli, encoded by the yddG gene, is a homologue of the known amino acid exporters RhtA and YdeD. Studies have shown that YddG is capable of exporting aromatic amino acids, including tryptophan. Thus, YddG c an function as a tryptophan exporter or a tryptophan secretion system (or tryptophan secretion protein). Other aromatic amino acid exporters are described in Doroshenko et al., FEMS Microbial Lett., 275:312-318 (2007). Thus, in some embodiments, the engineered bacteria optionally further comprise gene sequence(s) encoding YddG. In some embodiments, the engineered bacteria can over-express YddG. In some embodiments, the engineered bacteria optionally comprise one or more copies of yddG gene.

[0411] In some embodiments, the genetically engineered bacterium or genetically engineered microorganism comprises one or more genes for producing tryptophan, under the control of a promoter that is activated by low-oxygen conditions, by inflammatory conditions, liver damage, and or metabolic disease, such as any of the promoters activated by said conditions and described herein. In some embodiments, the genetically engineered bacteria expresses one or more genes for producing tryptophan. In some embodiments, the gene sequences(s) are controlled by an inducible promoter. In some embodiments, the gene sequences(s) are controlled by a constitutive promoter. In some embodiments, the gene sequences(s) are controlled by an inducible and/or constitutive promoter, and are expressed during bacterial culture in vitro, e.g., for bacterial expansion, production and/or manufacture, as described herein.

[0412] Table 9A and 9B lists exemplary tryptophan synthesis cassettes encoded by the genetically engineered bacteria of the disclosure.

TABLE 9A
Tryptophan Synthesis Cassette Sequences

| Description | Sequence |
|---|---|
| Tet-regulated | taagacccactttcacatttaagttgtttttctaatccgcatatgatcaattcaaggccgaataagaaggctggctct |
| Tryptophan | gcaccttggtgatcaaataattcgatagcttgtcgtaataatggcggcatactatcagtagtaggtgtttccctttct |
| operon | tctttagcgacttgatgctcttgatcttccaatacgcaacctaaagtaaaatgccccacagcgctgagtgcatata |
| SEQ ID NO: | atgcattctctagtgaaaaaccttgttggcataaaaaggctaattgattttcgagagtttcatactgtttttctgtagg |
| 71 | ccgtgtacctaaatgtacttttgctccatcgcgatgacttagtaaagcacatctaaaacttttagcgttattacgtaa |
| | aaaatcttgccagctttccccttctaaagggcaaaagtgagtatggtgcctatctaacatctcaatggctaaggcg |
| | tcgagcaaagcccgcttattttttacatgccaatacaatgtaggctgctctacacctagcttctgggcgagtttacg |
| | ggttgttaaaccttcgattccgacctcattaagcagctctaatgcgctgttaatcactttacttttatctaatctagaca |
| | tcattaattcctaatttttgttgacactctatcattgatagagttattttaccactccctatcagtgatagagaaaagtg |
| | aactctagaaataattttgtttaactttaagaaggagatatacatatgcaaacacaaaaaccgactctcgaactgct |
| | aacctgcgaaggcgcttatcgcgacaacccgactgcgctttttcaccagttgtgtggggatcgtccggcaacg |
| | ctgctgctggaatccgcagatatcgacagcaaagatgatttaaaaagcctgctgctggtagacagtgcgctgc |
| | gcattacagcattaagtgacactgtcacaatccaggcgctttccggcaatggagaagccctgttgacactactg |
| | gataacgccttgcctgcgggtgtggaaaatgaacaatcaccaaactgccgcgtactgcgcttcccgcctgtca |
| | gtccactgctggatgaagacgcccgcttatgctccctttcggtttttgacgctttccgcttattacagaatctgttga |
| | atgtaccgaaggaagaacgagaagcaatgttcttcggcggcctgttctcttatgaccttgtggcgggatttgaaa |
| | atttaccgcaactgtcagcggaaaatagctgccctgatttctgtttttatctcgctgaaacgctgatggtgattgac |
| | catcagaaaaaaagcactcgtattcaggccagcctgtttgctccgaatgaagaagaaaaacaacgtctcactgc |
| | tcgcctgaacgaactacgtcagcaactgaccgaagccgcgccgccgctgccggtggtttccgtgccgcatat |
| | gcgttgtgaatgtaaccagagcgatgaagagttcggtggtgtagtgcgtttgttgcaaaaagcgattcgcgccg |
| | gagaaattttccaggtggtgccatctcgccgtttctctctgccctgcccgtcaccgctggcagcctattacgtgct |
| | gaaaaagagtaatcccagcccgtacatgttttttatgcaggataatgatttcaccctgtttggcgcgtcgccggaa |
| | agttcgctcaagtatgacgccaccagccgccagattgagatttacccgattgccggaacacgtccacgcggtc |
| | gtcgtgccgatggttcgctggacagagacctcgacagccgcatcgaactggagatgcgtaccgatcataaag |
| | agctttctgaacatctgatgctggtggatctcgcccgtaatgacctggcacgcatttgcacacccggcagccgc |
| | tacgtcgccgatctcaccaaagttgaccgttactcttacgtgatgcacctagtctcccgcgttgttggtgagctgc |
| | gccacgatctcgacgccctgcacgcttaccgcgcctgtatgaatatggggacgttaagcggtgcaccgaaagt |
| | acgcgctatgcagttaattgccgaagcagaaggtcgtcgacgcggcagctacggcggcgcggtaggttatttt |
| | accgcgcatggcgatctcgacacctgcattgtgatccgctcggcgctggtggaaaacggtatcgccaccgtgc |
| | aagccggtgctggcgtagtccttgattctgttccgcagtcggaagccgacgaaactcgtaataaagcccgcgc |
| | tgtactgcgcgctattgccaccgcgcatcatgcacaggagacgttctaatggctgacattctgctgctcgataat |
| | atcgactcttttacgtacaacctggcagatcagttgcgcagcaatggtcataacgtggtgatttaccgcaaccata |
| | ttccggcgcagaccttaattgaacgcctggcgacgatgagcaatccggtgctgatgctttctcctggccccggt |
| | gtgccgagcgaagccggttgtatgccggaactcctcacccgcttgcgtggcaagctgccaattattggcatttg |
| | cctcggacatcaggcgattgtcgaagcttacgggggctatgtcggtcaggcgggcgaaattcttcacggtaaa |
| | gcgtcgagcattgaacatgacggtcaggcgatgtttgccggattaacaaacccgctgccagtggcgcgttatc |
| | actcgctggttggcagtaacattccggccggtttaaccatcaacgcccattttaatggcatggtgatggcggtgc |
| | gtcacgatgcagatcgcgtttgtggattccagttccatccggaatccattcttactacccagggcgctcgcctgct |
| | ggaacaaacgctggcctgggcgcagcagaaactagagccaaccaacacgctgcaaccgattctggaaaaa |
| | ctgtatcaggcacagacgcttagccaacaagaaagccaccagctgttttcagcggtggtacgtggcgagctga |
| | agccggaacaactggcggcggcgctggtgagcatgaaaattcgcggtgaacacccgaacgagatcgccgg |
| | ggcagcaaccgcgctactggaaaacgccgcgccattcccgcgcccggattatctgtttgccgatatcgtcggt |
| | actggcggtgacggcagcaacagcatcaatatttctaccgccagtgcgtttgtcgccgcggcctgcgggctga |
| | aagtggcgaaacacggcaaccgtagcgtctccagtaaatccggctcgtcggatctgctggcggcgttcggtat |
| | taatcttgatatgaacgccgataaatcgcgccaggcgctggatgagttaggcgtctgtttcctctttgcgccgaa |
| | gtatcacaccggattccgccatgcgatgccggttcgccagcaactgaaaacccgcactctgttcaacgtgctg |
| | ggaccattgattaacccggcgcatccgccgctggcgctaattggtgtttatagtccggaactggtgctgccgatt |
| | gccgaaaccttgcgcgtgctggggtatcaacgcgcggcagtggtgcacagcggcgggatggatgaagtttc |
| | attacacgcgccgacaatcgttgccgaactacatgacggcgaaattaagagctatcaattgaccgctgaagatt |
| | ttggcctgacaccctaccaccaggagcaattggcaggcggaacaccggaagaaaaccgtgacattttaacac |
| | gcttgttacaaggtaaaggcgacgccgcccatgaagcagccgtcgcggcgaatgtcgccatgttaatgcgcct |
| | gcatggccatgaagatctgcaagccaatgcgcaaaccgttcttgaggtactgcgcagtggttccgcttacgaca |
| | gagtcaccgcactggcggcacgagggtaaatgatgcaaaccgttttagcgaaaatcgtcgcagacaaggcg |
| | atttgggtagaaacccgcaaagagcagcaaccgctggccagttttcagaatgaggttcagccgagcacgcga |
| | catttttatgatgcacttcagggcgcacgcacggcgtttattctggagtgtaaaaaagcgtcgccgtcaaaaggc |
| | gtgatccgtgatgatttcgatccggcacgcattgccgccatttataaacattacgcttcggcaatttcagtgctgac |
| | tgatgagaaatattttcaggggagctttgatttcctccccatcgtcagccaaatcgccccgcagccgattttatgta |
| | aagacttcattatcgatccttaccagatctatctggcgcgctattaccaggccgatgcctgcttattaatgctttcag |
| | tactggatgacgaacaatatcgccagcttgcagccgtcgcccacagtctggagatgggtgtgctgaccgaagt |
| | cagtaatgaagaggaactggagcgcgccattgcattgggggcaaaggtcgttggcatcaacaaccgcgatct |
| | gcgcgatttgtcgattgatctcaaccgtacccgcgagcttgcgccgaaactggggcacaacgtgacggtaatc |
| | agcgaatccggcatcaatacttacgctcaggtgcgcgagttaagccacttcgctaacggctttctgattggttcg |
| | gcgttgatggcccatgacgatttgaacgccgccgtgcgtcgggtgttgctgggtgagaataaagtatgtggcct |
| | gacacgtgggcaagatgctaaagcagcttatgacgcgggcgcgatttacggtgggttgatttttgttgcgacat |
| | caccgcgttgcgtcaacgttgaacaggcgcaggaagtgatggctgcagcaccgttgcagtatgttggcgtgtt |
| | ccgcaatcacgatattgccgatgtggcggacaaagctaaggtgttatcgctggcggcagtgcaactgcatggt |
| | aatgaagatcagctgtatatcgacaatctgcgtgaggctctgccagcacacgtcgccatctggaaggctttaag |
| | tgtcggtgaaactcttcccgcgcgcgattttcagcacatcgataaatatgtattcgacaacggtcagggcggga |
| | gcggacaacgtttcgactggtcactattaaatggtcaatcgcttggcaacgttctgctggcggggggcttaggc |
| | gcagataactgcgtggaagcggcacaaaccggctgcgccgggcttgattttaattctgctgtagagtcgcaac |
| | cgggtatcaaagacgcacgtcttttggcctcggttttccagacgctgcgcgcatattaaggaaaggaacaatga |
| | caacattacttaacccctattttggtgagtttggcggcatgtacgtgccacaaatcctgatgcctgctctgcgcca |
| | gctggaagaagcttttgtcagcgcgcaaaaagatcctgaatttcaggctcagttcaacgacctgctgaaaaact |
| | atgccgggcgtccaaccgcgctgaccaaatgccagaacattacagccgggacgaacaccacgctgtatctga |
| | agcgcgaagatttgctgcacggcggcgcgcataaaactaaccaggtgctcggtcaggctttactggcgaagc |
| | ggatgggtaaaactgaaattattgccgaaaccggtgccggtcagcatggcgtggcgtcggcccttgccagcg |
| | ccctgctcggcctgaaatgccgaatttatatgggtgccaaagacgttgaacgccagtcgcccaacgttttccgg |
| | atgcgcttaatgggtcggaagtgatcccggtacatagcggttccgcgaccctgaaagatgcctgtaatgagg |
| | cgctacgcgactggtccggcagttatgaaaccgcgcactatatgctgggtaccgcagctggcccgcatcctta |
| | cccgaccattgtgcgtgagtttcagcggatgattggcgaagaaacgaaagcgcagattctggaaagagaagg |
| | tcgcctgccggatgccgttatcgcctgtgttggcggtggttcgaatgccatcggtatgtttgcagatttcatcaac |
| | gaaaccgacgtcggcctgattggtgtggagcctggcggccacggtatcgaaactggcgagcacggcgcacc |
| | gttaaaacatggtcgcgtgggcatctatttcggtatgaaagcgccgatgatgcaaaccgaagacgggcaaatt |
| | gaagagtcttactccatttctgccgggctggatttcccgtccgtcggcccgcaacatgcgtatctcaacagcact |
| | ggacgcgctgattacgtgtctattaccgacgatgaagccctggaagcctttaaaacgctttgcctgcatgaagg |
| | gatcatcccggcgctggaatcctcccacgccctggcccatgcgctgaaaatgatgcgcgaaaatccggaaaa |
| | agagcagctactggtggttaacctttccggtcgcggcgataaagacatcttcaccgttcacgatattttgaaagc |
| | acgaggggaaatctgatggaacgctacgaatctctgtttgcccagttgaaggagcgcaaagaaggcgcattc |
| | gttcctttcgtcaccctcggtgatccgggcattgagcagtcgttgaaaattatcgatacgctaattgaagccggtg |
| | ctgacgcgctggagttaggcatccccttctccgacccactggcggatggcccgacgattcaaaacgccacact |
| | gcgtgcttttgcggcgggagtaaccccggcgcagtgctttgagatgctggcactcattcgccagaagcacccg |
| | accattcccatcggccttttgatgtatgccaacctggtgtttaacaaaggcattgatgagttttatgccgagtgcga |
| | gaaagtcggcgtcgattcggtgctggttgccgatgtgcccgtggaagagtccgcgcccttccgccaggccgc |
| | gttgcgtcataatgtcgcacctatctttatttgcccgccgaatgccgacgatgatttgctgcgccagatagcctctt |
| | acggtcgtggttacacctatttgctgtcgcgagcgggcgtgaccggcgcagaaaaccgcgccgcgttacccc |
| | tcaatcatctggttgcgaagctgaaagagtacaacgctgcgcctccattgcagggatttggtatttccgccccgg |
| | atcaggtaaaagccgcgattgatgcaggagctgcgggcgcgatttctggttcggccatcgttaaaatcatcgag |
| | caacatattaatgagccagagaaaatgctggcggcactgaaagcttttgtacaaccgatgaaagcggcgacgc |
| | gcagttaatacgcatggcatggatgaCCGATGGTAGTGTGGGGTCTCCCCATGCG |
| | AGAGTAGGGAACTGCCAGGCATCAAATAAAACGAAAGGCTCAGT |
| | CGAAAGACTGGGCCTTTCGTTTTATCTGTTGTTTGTCGGTGAACGC |
| | TCTCCTGAGTAGGACAAATCCGCCGGGAGCGGATTTGAACGTTGC |
| | GAAGCAACGGCCCGGAGGGTGGCGGGCAGGACGCCCGCCATAAA |
| | CTGCCAGGCATCAAATTAAGCAGAAGGCCATCCTGACGGATGGCC |
| | TTTTTGCGTGGCCAGTGCCAAGCTTGCATGCGTGC |
| trpE | atgcaaacacaaaaaccgactctcgaactgctaacctgcgaaggcgcttatcgcgacaacccgactgcgctttt |
| SEQ ID NO: | tcaccagttgtgtggggatcgtccggcaacgctgctgctggaatccgcagatatcgacagcaaagatgatttaa |
| 74 | aaagcctgctgaggtagacagtgcgctgcgcattacagcattaagtgacactgtcacaatccaggcgctttcc |
| | ggcaatggagaagccctgttgacactactggataacgccttgcctgcgggtgtggaaaatgaacaatcaccaa |
| | actgccgcgtactgcgcttcccgcctgtcagtccactgctggatgaagacgcccgcttatgctccctttcggtttt |
| | tgacgattccgcttattacagaatctgttgaatgtaccgaaggaagaacgagaagcaatgttcggcggcct |
| | gttctcttatgaccttgtggcgggatttgaaaatttaccgcaactgtcagcggaaaatagctgccctgatttctgttt |
| | ttatctcgctgaaacgctgatggtgattgaccatcagaaaaaaagcactcgtattcaggccagcctgtttgctcc |
| | gaatgaagaagaaaaacaacgtctcactgctcgcctgaacgaactacgtcagcaactgaccgaagccgcgc |
| | cgccgctgccggtggtttccgtgccgcatatgcgttgtgaatgtaaccagagcgatgaagagttcggtggtgta |
| | gtgcgtttgttgcaaaaagcgattcgcgccggagaaattttccaggtggtgccatctcgccgtttctctctgccct |
| | gcccgtcaccgctggcagcctattacgtgctgaaaaagagtaatcccagcccgtacatgttttttatgcaggata |
| | atgatttcaccctgtttggcgcgtcgccggaaagttcgctcaagtatgacgccaccagccgccagattgagattt |
| | acccgattgccggaacacgtccacgcggtcgtcgtgccgatggttcgctggacagagacctcgacagccgc |
| | atcgaactggagatgcgtaccgatcataaagagctttctgaacatctgatgctggtggatctcgcccgtaatgac |
| | ctggcacgcatttgcacacccggcagccgctacgtcgccgatctcaccaaagttgaccgttactcttacgtgat |
| | gcacctagtctcccgcgttgttggtgagctgcgccacgatctcgacgccctgcacgcttaccgcgcctgtatga |
| | atatggggacgttaagcggtgcaccgaaagtacgcgctatgcagttaattgccgaagcagaaggtcgtcgac |
| | gcggcagctacggcggcgcggtaggttattttaccgcgcatggcgatctcgacacctgcattgtgatccgctc |
| | ggcgctggtggaaaacggtatcgccaccgtgcaagccggtgctggcgtagtccttgattctgttccgcagtcg |
| | gaagccgacgaaactcgtaataaagcccgcgctgtactgcgcgctattgccaccgcgcatcatgcacaggag |
| | acgttcta |
| trpD | atggctgacattctgctgctcgataatatcgactcttttacgtacaacctggcagatcagttgcgcagcaatggtc |
| SEQ ID NO: | ataacgtggtgatttaccgcaaccatattccggcgcagaccttaattgaacgcctggcgacgatgagcaatccg |
| 76 | gtgctgatgctttctcctggccccggtgtgccgagcgaagccggttgtatgccggaactcctcacccgcttgcg |
| | tggcaagctgccaattattggcatttgcctcggacatcaggcgattgtcgaagcttacgggggctatgtcggtca |
| | ggcgggcgaaattcttcacggtaaagcgtcgagcattgaacatgacggtcaggcgatgtttgccggattaaca |
| | aacccgctgccagtggcgcgttatcactcgctggttggcagtaacattccggccggtttaaccatcaacgccca |
| | ttttaatggcatggtgatggcggtgcgtcacgatgcagatcgcgtttgtggattccagttccatccggaatccatt |
| | cttactacccagggcgctcgcctgctggaacaaacgctggcctgggcgcagcagaaactagagccaaccaa |
| | cacgctgcaaccgattctggaaaaactgtatcaggcacagacgcttagccaacaagaaagccaccagctgttt |
| | tcagcggtggtacgtggcgagctgaagccggaacaactggcggcggcgctggtgagcatgaaaattcgcgg |
| | tgaacacccgaacgagatcgccggggcagcaaccgcgctactggaaaacgccgcgccattcccgcgcccg |
| | gattatctgtttgccgatatcgtcggtactggcggtgacggcagcaacagcatcaatatttctaccgccagtgcg |
| | tttgtcgccgcggcctgcgggctgaaagtggcgaaacacggcaaccgtagcgtctccagtaaatccggctcg |
| | tcggatctgctggcggcgttcggtattaatcttgatatgaacgccgataaatcgcgccaggcgctggatgagtta |
| | ggcgtctgtttcctctttgcgccgaagtatcacaccggattccgccatgcgatgccggttcgccagcaactgaa |
| | aacccgcactctgttcaacgtgctgggaccattgattaacccggcgcatccgccgctggcgctaattggtgata |
| | tagtccggaactggtgctgccgattgccgaaaccttgcgcgtgctggggtatcaacgcgcggcagtggtgca |
| | cagcggcgggatggatgaagtttcattacacgcgccgacaatcgttgccgaactacatgacggcgaaattaag |
| | agctatcaattgaccgctgaagattttggcctgacaccctaccaccaggagcaattggcaggcggaacaccgg |
| | aagaaaaccgtgacattttaacacgcttgttacaaggtaaaggcgacgccgcccatgaagcagccgtcgcgg |
| | cgaatgtcgccatgttaatgcgcctgcatggccatgaagatctgcaagccaatgcgcaaaccgttcttgaggta |
| | ctgcgcagtggttccgcttacgacagagtcaccgcactggcggcacgagggtaa |
| trpC | atgcaaaccgttttagcgaaaatcgtcgcagacaaggcgatttgggtagaaacccgcaaagagcagcaaccg |
| SEQ ID NO: | ctggccagttttcagaatgaggttcagccgagcacgcgacatttttatgatgcacttcagggcgcacgcacggc |
| 78 | gtttattctggagtgtaaaaaagcgtcgccgtcaaaaggcgtgatccgtgatgatttcgatccggcacgcattgc |
| | cgccatttataaacattacgcttcggcaatttcagtgctgactgatgagaaatattttcaggggagctttgatttcct |
| | ccccatcgtcagccaaatcgccccgcagccgattttatgtaaagacttcattatcgatccttaccagatctatctg |
| | gcgcgctattaccaggccgatgcctgcttattaatgctttcagtactggatgacgaacaatatcgccagcttgca |
| | gccgtcgcccacagtctggagatgggtgtgctgaccgaagtcagtaatgaagaggaactggagcgcgccatt |
| | gcattgggggcaaaggtcgttggcatcaacaaccgcgatctgcgcgatttgtcgattgatctcaaccgtacccg |
| | cgagcttgcgccgaaactggggcacaacgtgacggtaatcagcgaatccggcatcaatacttacgctcaggt |
| | gcgcgagttaagccacttcgctaacggctttctgattggttcggcgttgatggcccatgacgatttgaacgccgc |
| | cgtgcgtcgggtgttgctgggtgagaataaagtatgtggcctgacacgtgggcaagatgctaaagcagcttat |
| | gacgcgggcgcgatttacggtgggttgatttttgttgcgacatcaccgcgttgcgtcaacgttgaacaggcgca |
| | ggaagtgatggctgcagcaccgttgcagtatgttggcgtgttccgcaatcacgatattgccgatgtggcggaca |
| | aagctaaggtgttatcgctggcggcagtgcaactgcatggtaatgaagatcagctgtatatcgacaatctgcgt |
| | gaggctctgccagcacacgtcgccatctggaaggctttaagtgtcggtgaaactcttcccgcgcgcgattttca |
| | gcacatcgataaatatgtattcgacaacggtcagggcgggagcggacaacgtttcgactggtcactattaaatg |
| | gtcaatcgcttggcaacgttctgctggcggggggcttaggcgcagataactgcgtggaagcggcacaaaccg |
| | gctgcgccgggcttgattttaattctgctgtagagtcgcaaccgggtatcaaagacgcacgtcttttggcctcggt |
| | tttccagacgctgcgcgcatattaa |
| trpB | atgacaacattacttaacccctattttggtgagtttggcggcatgtacgtgccacaaatcctgatgcctgctctgcg |
| SEQ ID NO: | ccagctggaagaagcttttgtcagcgcgcaaaaagatcctgaatttcaggctcagttcaacgacctgctgaaaa |
| 80 | actatgccgggcgtccaaccgcgctgaccaaatgccagaacattacagccgggacgaacaccacgctgtatc |
| | tgaagcgcgaagatttgctgcacggcggcgcgcataaaactaaccaggtgctcggtcaggctttactggcga |
| | agcggatgggtaaaactgaaattattgccgaaaccggtgccggtcagcatggcgtggcgtcggcccttgcca |
| | gcgccctgctcggcctgaaatgccgaatttatatgggtgccaaagacgttgaacgccagtcgcccaacgttttc |
| | cggatgcgcttaatgggtgcggaagtgatcccggtacatagcggttccgcgaccctgaaagatgcctgtaatg |
| | aggcgctacgcgactggtccggcagttatgaaaccgcgcactatatgctgggtaccgcagctggcccgcatc |
| | cttacccgaccattgtgcgtgagtttcagcggatgattggcgaagaaacgaaagcgcagattctggaaagaga |
| | aggtcgcctgccggatgccgttatcgcctgtgttggcggtggttcgaatgccatcggtatgtttgcagatttcatc |
| | aacgaaaccgacgtcggcctgattggtgtggagcctggcggccacggtatcgaaactggcgagcacggcgc |
| | accgttaaaacatggtcgcgtgggcatctatttcggtatgaaagcgccgatgatgcaaaccgaagacgggcaa |
| | attgaagagtcttactccatttctgccgggctggatttcccgtccgtcggcccgcaacatgcgtatctcaacagc |
| | actggacgcgctgattacgtgtctattaccgacgatgaagccctggaagcctttaaaacgctttgcctgcatgaa |
| | gggatcatcccggcgctggaatcctcccacgccctggcccatgcgctgaaaatgatgcgcgaaaatccggaa |
| | aaagagcagctactggtggttaacctttccggtcgcggcgataaagacatcttcaccgttcacgatattttgaaa |
| | gcacgaggggaaatctga |
| trpA | atggaacgctacgaatctctgtttgcccagttgaaggagcgcaaagaaggcgcattcgttcctttcgtcaccctc |
| SEQ ID NO: | ggtgatccgggcattgagcagtcgttgaaaattatcgatacgctaattgaagccggtgctgacgcgctggagtt |
| 82 | aggcatccccttctccgacccactggcggatggcccgacgattcaaaacgccacactgcgtgcttttgcggcg |
| | ggagtaaccccggcgcagtgctttgagatgctggcactcattcgccagaagcacccgaccattcccatcggcc |
| | ttttgatgtatgccaacctggtgtttaacaaaggcattgatgagttttatgccgagtgcgagaaagtcggcgtcga |
| | ttcggtgctggttgccgatgtgcccgtggaagagtccgcgcccttccgccaggccgcgttgcgtcataatgtcg |
| | cacctatctttatttgcccgccgaatgccgacgatgatttgctgcgccagatagcctcttacggtcgtggttacac |
| | ctatttgctgtcgcgagcgggcgtgaccggcgcagaaaaccgcgccgcgttacccctcaatcatctggttgcg |
| | aagctgaaagagtacaacgctgcgcctccattgcagggatttggtatttccgccccggatcaggtaaaagccg |
| | cgattgatgcaggagctgcgggcgcgatttctggttcggccatcgttaaaatcatcgagcaacatattaatgagc |
| | cagagaaaatgctggcggcactgaaagcttttgtacaaccgatgaaagcggcgacgcgcagttaa |

TABLE 9B
Tryptophan Synthesis Polypeptide Sequences

| Description | Sequence |
|---|---|
| TrpE | MQTQKPTLELLTCEGAYRDNPTALFHQLCGDRPATLL |
| SEQ ID NO: 75 | LESADIDSKDDLKSLLLVDSALRITALSDTVTIQALSGN |
| | GEALLTLLDNALPAGVENEQSPNCRVLRFPPVSPLLDE |
| | DARLCSLSVFDAFRLLQNLLNVPKEEREAMFFGGLFS |
| | YDLVAGFENLPQLSAENSCPDFCFYLAETLMVIDHQK |
| | KSTRIQASLFAPNEEEKQRLTARLNELRQQLTEAAPPL |
| | PVVSVPHMRCECNQSDEEFGGVVRLLQKAIRAGEIFQ |
| | VVPSRRFSLPCPSPLAAYYVLKKSNPSPYMFFMQDND |
| | FTLFGASPESSLKYDATSRQIEIYPIAGTRPRGRRADGS |
| | LDRDLDSRIELEMRTDHKELSEHLMLVDLARNDLARI |
| | CTPGSRYVADLTKVDRYSYVMHLVSRVVGELRHDLD |
| | ALHAYRACMNMGTLSGAPKVRAMQLIAEAEGRRRGS |
| | YGGAVGYFTAHGDLDTCIVIRSALVENGIATVQAGAG |
| | VVLDSVPQSEADETRNKARAVLRAIATAHHAQETF |
| TrpD | MADILLLDNIDSFTYNLADQLRSNGHNVVIYRNHIPAQ |
| SEQ ID NO: 77 | TLIERLATMSNPVLMLSPGPGVPSEAGCMPELLTRLRG |
| | KLPIIGICLGHQAIVEAYGGYVGQAGEILHGKASSIEHD |
| | GQAMFAGLTNPLPVARYHSLVGSNIPAGLTINAHFNG |
| | MVMAVRHDADRVCGFQFHPESILTTQGARLLEQTLA |
| | WAQQKLEPTNTLQPILEKLYQAQTLSQQESHQLFSAV |
| | VRGELKPEQLAAALVSMKIRGEHPNEIAGAATALLEN |
| | AAPFPRPDYLFADIVGTGGDGSNSINISTASAFVAAAC |
| | GLKVAKHGNRSVSSKSGSSDLLAAFGINLDMNADKSR |
| | QALDELGVCFLFAPKYHTGFRHAMPVRQQLKTRTLF |
| | NVLGPLINPAHPPLALIGVYSPELVLPIAETLRVLGYQR |
| | AAVVHSGGMDEVSLHAPTIVAELHDGEIKSYQLTAED |
| | FGLTPYHQEQLAGGTPEENRDILTRLLQGKGDAAHEA |
| | AVAANVAMLMRLHGHEDLQANAQTVLEVLRSGSAY |
| | DRVTALAARG |
| TrpC | MQTVLAKIVADKAIWVETRKEQQPLASFQNEVQPSTR |
| SEQ ID NO: 79 | HFYDALQGARTAFILECKKASPSKGVIRDDFDPARIAA |
| | IYKHYASAISVLTDEKYFQGSFDFLPIVSQIAPQPILCK |
| | DFIIDPYQIYLARYYQADACLLMLSVLDDEQYRQLAA |
| | VAHSLEMGVLTEVSNEEELERAIALGAKVVGINNRDL |
| | RDLSIDLNRTRELAPKLGHNVTVISESGINTYAQVREL |
| | SHFANGFLIGSALMAHDDLNAAVRRVLLGENKVCGL |
| | TRGQDAKAAYDAGAIYGGLIFVATSPRCVNVEQAQE |
| | VMAAAPLQYVGVFRNHDIADVADKAKVLSLAAVQL |
| | HGNEDQLYIDNLREALPAHVAIWKALSVGETLPARDF |
| | QHIDKYVFDNGQGGSGQRFDWSLLNGQSLGNVLLAG |
| | GLGADNCVEAAQTGCAGLDFNSAVESQPGIKDARLL |
| | ASVFQTLRAY |
| TrpB | MTTLLNPYFGEFGGMYVPQILMPALRQLEEAFVSAQK |
| SEQ ID NO: 81 | DPEFQAQFNDLLKNYAGRPTALTKCQNITAGTNTTLY |
| | LKREDLLHGGAHKTNQVLGQALLAKRMGKTEIIAET |
| | GAGQHGVASALASALLGLKCRIYMGAKDVERQSPNV |
| | FRMRLMGAEVIPVHSGSATLKDACNEALRDWSGSYE |
| | TAHYMLGTAAGPHPYPTIVREFQRMIGEETKAQILERE |
| | GRLPDAVIACVGGGSNAIGMFADFINETDVGLIGVEPG |
| | GHGIETGEHGAPLKHGRVGIYFGMKAPMMQTEDGQI |
| | EESYSISAGLDFPSVGPQHAYLNSTGRADYVSITDDEA |
| | LEAFKTLCLHEGIIPALESSHALAHALKMMRENPEKEQ |
| | LLVVNLSGRGDKDIFTVHDILKARGEI |
| TrpA | MERYESLFAQLKERKEGAFVPFVTLGDPGIEQSLKIID |
| SEQ ID NO: 83 | TLIEAGADALELGIPFSDPLADGPTIQNATLRAFAAGV |
| | TPAQCFEMLALIRQKHPTIPIGLLMYANLVFNKGIDEF |
| | YAECEKVGVDSVLVADVPVEESAPFRQAALRHNVAPI |
| | FICPPNADDDLLRQIASYGRGYTYLLSRAGVTGAENR |
| | AALPLNHLVAKLKEYNAAPPLQGFGISAPDQVKAAID |
| | AGAAGAISGSAIVKIIEQHINEPEKMLAALKAFVQPMK |
| | AATRS |

[0413] In some embodiments, the genetically engineered bacteria comprise one or more nucleic acid sequence of Table 9A or a functional fragment thereof. In some embodiments, the genetically engineered bacteria comprise a nucleic acid sequence that, but for the redundancy of the genetic code, encodes the same polypeptide as one or more nucleic acid sequence of Table 9B or a functional fragment thereof. In some embodiments, genetically engineered bacteria comprise a nucleic acid sequence that is at least about 80%, at least about 85%, at least about 90%, at least about 95%, or at least about 99% homologous to the DNA sequence of one or more nucleic acid sequence of Table 9A or a functional fragment thereof, or a nucleic acid sequence that, but for the redundancy of the genetic code, encodes the same polypeptide as one or more nucleic acid sequence of Table 9B or a functional fragment thereof.

[0414] In one embodiment, one or more polypeptides and/or polynucleotides encoded and expressed by the genetically engineered bacteria have at least about 80% identity with one or more of SEQ ID NO: 71 through SEQ ID NO: 83. In one embodiment, one or more polypeptides and/or polynucleotides encoded and expressed by the genetically engineered bacteria have at least about 85% identity with one or more of SEQ ID NO: 71 through SEQ ID NO: 83. In one embodiment, one or more polypeptides and/or polynucleotides encoded and expressed by the genetically engineered bacteria have at least about 90% identity with one or more of SEQ ID NO: 71 through SEQ ID NO: 83. In one embodiment, one or more polypeptides and/or polynucleotides encoded and expressed by the genetically engineered bacteria have at least about 95% identity with one or more of SEQ ID NO: 71 through SEQ ID NO: 83. In one embodiment, one or more polypeptides and/or polynucleotides encoded and expressed by the genetically engineered bacteria have have at least about 96%, 97%, 98%, or 99% identity with one or more of SEQ ID NO: 71 through SEQ ID NO: 83. Accordingly, in one embodiment, one or more polypeptides and/or polynucleotides expressed by the genetically engineered bacteria have at least about 80%, 81%, 82%, 83%, 84%, 85%, 86%, 87%, 88%, 89%, 90%, 91%, 92%, 93%, 94%, 95%, 96%, 97%, 98%, or 99% identity with one or more of SEQ ID NO: 71 through SEQ ID NO: 83. In another embodiment, one or more polynucleotides and/or polypeptides encoded and expressed by the genetically engineered bacteria comprise the sequence of one or more of SEQ ID NO: 71 through SEQ ID NO: 83. In another embodiment, one or more polynucleotides and/or polypeptides encoded and expressed by the genetically engineered bacteria consist of the sequence of one or more of SEQ ID NO: 71 through SEQ ID NO: 83.

[0415] Table 10A depicts exemplary polypeptide sequences feedback resistant AroG and TrpE. Table 10A also depicts an exemplary TnaA (tryptophanase from E. coli) sequence. IN some embodiments, the sequence is encoded in circuits for tryptophan catabolism to indole; in other embodiments, the sequence is deleted from the E. coli chromosome to increase levels of tryptophan.

TABLE 10A
Feedback resistant AroG and TrpE and tryptophanase sequences

| Description | Sequence |
|---|---|
| AroGfbr: feedback | MNYQNDDLRIKEIKELLPPVALLEKFPATENAANTVAHARKAI |
| resistant 2-dehydro- | HKILKGNDDRLLVVIGPCSIHDPVAAKEYATRLLTLREELQDE |
| 3- | LEIVMRVYFEKPRTTVGWKGLINDPHMDNSFQINDGLRIARK |
| deoxyphosphohept | LLLDINDSGLPAAGEFLDMITLQYLADLMSWGAIGARTTESQ |
| onate aldolase from | VHRELASGLSCPVGFKNGTDGTIKVAIDAINAAGAPHCFLSVT |
| E. coli | KWGHSAIVNTSGNGDCHIILRGGKEPNYSAKHVAEVKEGLNK |
| SEQ ID NO: 84 | AGLPAQVMIDFSHANSSKQFKKQMDVCTDVCQQIAGGEKAII |
| | GVMVESHLVEGNQSLESGEPLAYGKSITDACIGWDDTDALLR |
| | QLASAVKARRG |
| TrpEfbr: feedback | MQTQKPTLELLTCEGAYRDNPTALFHQLCGDRPATLLLEFADI |
| resistant | DSKDDLKSLLLVDSALRITALSDTVTIQALSGNGEALLTLLDN |
| anthranilate | ALPAGVENEQSPNCRVLRFPPVSPLLDEDARLCSLSVFDAFRL |
| synthase | LQNLLNVPKEEREAMFFGGLFSYDLVAGFENLPQLSAENSCP |
| component I from | DFCFYLAETLMVIDHQKKSTRIQASLFAPNEEEKQRLTARLNE |
| E. coli | LRQQLTEAAPPLPVVSVPHMRCECNQSDEEFGGVVRLLQKAI |
| SEQ ID NO: 85 | RAGEIFQVVPSRRFSLPCPSPLAAYYVLKKSNPSPYMFFMQDN |
| | DFTLFGASPESSLKYDATSRQIEIYPIAGTRPRGRRADGSLDRD |
| | LDSRIELEMRTDHKELSEHLMLVDLARNDLARICTPGSRYVA |
| | DLTKVDRYSYVMHLVSRVVGELRHDLDALHAYRACMNMGT |
| | LSGAPKVRAMQLIAEAEGRRRGSYGGAVGYFTAHGDLDTCIV |
| | IRSALVENGIATVQAGAGVVLDSVPQSEADETRNKARAVLRA |
| | IATAHHAQETF |
| SerA: 2- | MAKVSLEKDKIKFLLVEGVHQKALESLRAAGYTNIEFHKGAL |
| oxoglutarate | DDEQLKESIRDAHFIGLRSRTHLTEDVINAAEKLVAIGCFCIGT |
| reductase from E. | NQVDLDAAAKRGIPVFNAPFSNTRSVAELVIGELLLLLRGVPE |
| coli Nissle | ANAKAHRGVWNKLAAGSFEARGKKLGIIGYGHIGTQLGILAE |
| SEQ ID NO: 86 | SLGMYVYFYDIENKLPLGNATQVQHLSDLLNMSDVVSLHVPE |
| | NPSTKNMMGAKEISLMKPGSLLINASRGTVVDIPALCDALASK |
| | HLAGAAIDVFPTEPATNSDPFTSPLCEFDNVLLTPHIGGSTQEA |
| | QENIGLEVAGKLIKYSDNGSTLSAVNFPEVSLPLHGGRRLMHI |
| | HENRPGVLTALNKIFAEQGVNIAAQYLQTSAQMGYVVIDIEA |
| | DEDVAEKALQAMKAIPGTIRARLLY |
| SerAfbr: feedback | MAKVSLEKDKIKFLLVEGVHQKALESLRAAGYTNIEFHKGAL |
| resistant 2- | DDEQLKESIRDAHFIGLRSRTHLTEDVINAAEKLVAIGCFCIGT |
| oxoglutarate | NQVDLDAAAKRGIPVFNAPFSNTRSVAELVIGELLLLLRGVPE |
| reductase from E. | ANAKAHRGVWNKLAAGSFEARGKKLGIIGYGHIGTQLGILAE |
| coli Nissle | SLGMYVYFYDIENKLPLGNATQVQHLSDLLNMSDVVSLHVPE |
| | NPSTKNMMGAKEISLMKPGSLLINASRGTVVDIPALCDALASK |
| SEQ ID NO: 87 | HLAGAAIDVFPTEPATNSDPFTSPLCEFDNVLLTPHIGGSTQEA |
| | QENIGLEVAGKLIKYSDNGSTLSAVNFPEVSLPLHGGRRLMHI |
| | AEARPGVLTALNKIFAEQGVNIAAQYLQTSAQMGYVVIDIEA |
| | DEDVAEKALQAMKAIPGTIRARLLY |
| TnaA: | MENFKHLPEPFRIRVIEPVKRTTRAYREEAIIKSGMNPFLLDSE |
| tryptophanase from | DVFIDLLTDSGTGAVTQSMQAAMMRGDEAYSGSRSYYALAE |
| E. coli | SVKNIFGYQYTIPTHQGRGAEQIYIPVLIKKREQEKGLDRSKM |
| SEQ ID NO: 88 | VAFSNYFFDTTQGHSQINGCTVRNVYIKEAFDTGVRYDFKGN |
| | FDLEGLERGIEEVGPNNVPYIVATITSNSAGGQPVSLANLKVM |
| | YSIAKKYDIPVVMDSARFAENAYFIKQREAEYKDWTIEQITRE |
| | TYKYADMLAMSAKKDAMVPMGGLLCMKDDSFFDVYTECRT |
| | LCVVQEGFPTYGGLEGGAMERLAVGLYDGMNLDWLAYRIA |
| | QVQYLVDGLEEIGVVCQQAGGHAAFVDAGKLLPHIPADQFPA |
| | QALACELYKVAGIRAVEIGSFLLGRDPKTGKQLPCPAELLRLTI |
| | PRATYTQTHMDFIIEAFKHVKENAANIKGLTFTYEPKVLRHFT |
| | AKLKEV |

TABLE 10B

| | |
|---|---|
| fbrAroG | atgaattatcagaacgacgatttacgcatcaaagaaatcaaagagttacttcctcctgtcg |
| SEQ ID NO: 256 | cattgctggaaaaattccccgctactgaaaatgccgcgaatacggtcgcccatgcccga |
| | aaagcgatccataagatcctgaaaggtaatgatgatcgcctgttggtggtgattggccca |
| | tgctcaattcatgatcctgtcgcggctaaagagtatgccactcgcttgctgacgctgcgtg |
| | aagagctgcaagatgagctggaaatcgtgatgcgcgtctattttgaaaagccgcgtacta |
| | cggtgggctggaaagggctgattaacgatccgcatatggataacagcttccagatcaac |
| | gacggtctgcgtattgcccgcaaattgctgctcgatattaacgacagcggtctgccagcg |
| | gcgggtgaattcctggatatgatcaccctacaatatctcgctgacctgatgagctggggc |
| | gcaattggcgcacgtaccaccgaatcgcaggtgcaccgcgaactggcgtctggtctttc |
| | ttgtccggtaggtttcaaaaatggcactgatggtacgattaaagtggctatcgatgccatta |
| | atgccgccggtgcgccgcactgcttcctgtccgtaacgaaatgggggcattcggcgatt |
| | gtgaataccagcggtaacggcgattgccatatcattctgcgcggcggtaaagagcctaa |
| | ctacagcgcgaagcacgttgctgaagtgaaagaagggctgaacaaagcaggcctgcc |
| | agcgcaggtgatgatcgatttcagccatgctaactcgtcaaaacaattcaaaaagcagat |
| | ggatgtttgtactgacgtttgccagcagattgccggtggcgaaaaggccattattggcgt |
| | gatggtggaaagccatctggtggaaggcaatcagagcctcgagagcggggaaccgct |
| | ggcctacggtaagagcatcaccgatgcctgcattggctgggatgataccgatgctctgtt |
| | acgtcaactggcgagtgcagtaaaagcgcgtcgcgggtaa |
| fbrTrpE | atgcaaacacaaaaaccgactctcgaactgctaacctgcgaaggcgcttatcgcgacaa |
| SEQ ID NO: 274 | cccgactgcgctttttcaccagttgtgtggggatcgtccggcaacgctgctgctggaattc |
| | gcagatatcgacagcaaagatgatttaaaaagcctgctgctggtagacagtgcgctgcg |
| | cattacagcattaagtgacactgtcacaatccaggcgctttccggcaatggagaagccct |
| | gttgacactactggataacgccttgcctgcgggtgtggaaaatgaacaatcaccaaactg |
| | ccgcgtactgcgcttcccgcctgtcagtccactgctggatgaagacgcccgcttatgctc |
| | cctttcggtttttgacgctttccgcttattacagaatctgttgaatgtaccgaaggaagaacg |
| | agaagcaatgttctcggcggcctgttctcttatgaccttgtggcgggatttgaaaatttac |
| | cgcaactgtcagcggaaaatagctgccctgatttctgtttttatctcgctgaaacgctgatg |
| | gtgattgaccatcagaaaaaaagcactcgtattcaggccagcctgtttgctccgaatgaa |
| | gaagaaaaacaacgtctcactgctcgcctgaacgaactacgtcagcaactgaccgaag |
| | ccgcgccgccgctgccggtggtttccgtgccgcatatgcgttgtgaatgtaaccagagc |
| | gatgaagagttcggtggtgtagtgcgtttgttgcaaaaagcgattcgcgccggagaaatt |
| | ttccaggtggtgccatctcgccgtttctctctgccctgcccgtcaccgctggcagcctatta |
| | cgtgctgaaaaagagtaatcccagcccgtacatgttttttatgcaggataatgatttcaccc |
| | tgtttggcgcgtcgccggaaagttcgctcaagtatgacgccaccagccgccagattgag |
| | atttacccgattgccggaacacgtccacgcggtcgtcgtgccgatggttcgctggacag |
| | agacctcgacagccgcatcgaactggagatgcgtaccgatcataaagagctttctgaac |
| | atctgatgctggtggatctcgcccgtaatgacctggcacgcatttgcacacccggcagc |
| | cgctacgtcgccgatctcaccaaagttgaccgttactcttacgtgatgcacctagtctccc |
| | gcgttgttggtgagctgcgccacgatctcgacgccctgcacgcttaccgcgcctgtatga |
| | atatggggacgttaagcggtgcaccgaaagtacgcgctatgcagttaattgccgaagca |
| | gaaggtcgtcgacgcggcagctacggcggcgcggtaggttattttaccgcgcatggcg |
| | atctcgacacctgcattgtgatccgctcggcgctggtggaaaacggtatcgccaccgtg |
| | caagccggtgctggcgtagtccttgattctgttccgcagtcggaagccgacgaaactcgt |
| | aataaagcccgcgctgtactgcgcgctattgccaccgcgcatcatgcacaggagacgtt |
| | cta |
| SerA | atggcaaaggtatcgctggagaaagacaagattaagtttctgctggtagaaggcgtgca |
| SEQ ID NO: 258 | ccaaaaggcgctggaaagccttcgtgcagctggttacaccaacatcgaatttcacaaag |
| | gcgcgctggatgatgaacaattaaaagaatccatccgcgatgcccacttcatcggcctg |
| | cgatcccgtacccatctgactgaagacgtgatcaacgccgcagaaaaactggtcgctat |
| | tggctgtttctgtatcggaacaaatcaggttgatctggatgcggcggcaaagcgcgggat |
| | cccggtatttaacgcaccgttctcaaatacgcgctctgttgcggagctggtgattggcga |
| | actgctgctgctattgcgcggcgtgccagaagccaatgctaaagcgcatcgtggcgtgt |
| | ggaacaaactggcggcgggttcttttgaagcgcgcggcaaaaagctgggtatcatcgg |
| | ctacggtcatattggtacgcaattgggcattctggctgaatcgctgggaatgtatgtttactt |
| | ttatgatattgaaaacaaactgccgctgggcaacgccactcaggtacagcatctttctgac |
| | ctgctgaatatgagcgatgtggtgagtctgcatgtaccagagaatccgtccaccaaaaat |
| | atgatgggcgcgaaagagatttcgctaatgaagcccggctcgctgctgattaatgcttcg |
| | cgcggtactgtggtggatattccagcgctgtgtgacgcgctggcgagcaaacatctggc |
| | gggggcggcaatcgacgtattcccgacggaaccggcgaccaatagcgatccatttacc |
| | tctccgctgtgtgaattcgacaatgtccttctgacgccacacattggcggttcgactcagg |
| | aagcgcaggagaatatcggcttggaagttgcgggtaaattgatcaagtattctgacaatg |
| | gctcaacgctctctgcggtgaacttcccggaagtctcgctgccactgcacggtgggcgt |
| | cgtctgatgcacatccacgaaaaccgtccgggcgtgctaactgcgctcaacaaaattttt |
| | gccgagcagggcgtcaacatcgccgcgcaatatctacaaacttccgcccagatgggtt |
| | atgtagttattgatattgaagccgacgaagacgttgccgaaaaagcgctgcaggcaatg |
| | aaagctattccgggtaccattcgcgcccgtctgctgtactaa |
| SerAfbr | atggcaaaggtatcgctggagaaagacaagattaagtttctgctggtagaaggcgtgca |
| SEQ ID NO: 1510 | ccaaaaggcgctggaaagccttcgtgcagctggttacaccaacatcgaatttcacaaag |
| | gcgcgctggatgatgaacaattaaaagaatccatccgcgatgcccacttcatcggcctg |
| | cgatcccgtacccatctgactgaagacgtgatcaacgccgcagaaaaactggtcgctat |
| | tggctgtttctgtatcggaacaaatcaggttgatctggatgcggcggcaaagcgcgggat |
| | cccggtatttaacgcaccgttctcaaatacgcgctctgttgcggagctggtgattggcgaa |
| | ctgctgctgctattgcgcggcgtgccagaagccaatgctaaagcgcatcgtggcgtgtgg |
| | aacaaactggcggcgggttcttttgaagcgcgcggcaaaaagctgggtatcatcggcta |
| | cggtcatattggtacgcaattgggcattctggctgaatcgctgggaatgtatgtttacttttatg |
| | atattgaaaacaaactgccgctgggcaacgccactcaggtacagcatctttctgacctgc |
| | tgaatatgagcgatgtggtgagtctgcatgtaccagagaatccgtccaccaaaaatatga |
| | tgggcgcgaaagagatttcgctaatgaagcccggctcgctgctgattaatgcttcgcgcg |
| | gtactgtggtggatattccagcgctgtgtgacgcgctggcgagcaaacatctggcgggg |
| | gcggcaatcgacgtattcccgacggaaccggcgaccaatagcgatccatttacctctcc |
| | gctgtgtgaattcgacaatgtccttctgacgccacacattggcggttcgactcaggaagcg |
| | caggagaatatcggcttggaagttgcgggtaaattgatcaagtattctgacaatggctcaa |
| | cgctctctgcggtgaacttcccggaagtctcgctgccactgcacggtgggcgtcgtctgat |
| | gcacatcGCTgaaGCTcgtccgggcgtgctaactgcgctcaacaaaatttttgccga |
| | gcagggcgtcaacatcgccgcgcaatatctacaaacttccgcccagatgggttatgtagt |
| | tattgatattgaagccgacgaagacgttgccgaaaaagcgctgcaggcaatgaaagct |
| | attccgggtaccattcgcgcccgtctgctgtactaa |

[0416] In one embodiment, the genetically engineered bacteria comprise a sequence which has at least about 80% identity with one or more sequences of Table 10B. In another embodiment, the genetically engineered bacteria comprise a sequence which has at least about 85% identity with one or more sequences of Table 10B. In one embodiment, the genetically engineered bacteria comprise a sequence which has at least about 90% identity with one or more sequences of Table 10B. In one embodiment, the genetically engineered bacteria comprise a sequence which has at least about 95% identity with one or more sequences of Table 10B. In another embodiment, the genetically engineered bacteria comprise a sequence which has at least about 96%, 97%, 98%, or 99% identity with one or more sequences of Table 10B. Accordingly, in one embodiment, the genetically engineered bacteria comprise a sequence which has at least about 80%, 81%, 82%, 83%, 84%, 85%, 86%, 87%, 88%, 89%, 90%, 91%, 92%, 93%, 94%, 95%, 96%, 97%, 98%, or 99% identity with one or more sequences of Table 10B. In yet another embodiment the genetically engineered bacteria comprise a sequence which consists of the sequence of with one or more sequences of Table 10B.

[0417] In one embodiment, the genetically engineered bacteria comprise a sequence which has at least about 80% identity with SEQ ID NO: 256. In another embodiment, the genetically engineered bacteria comprise a sequence which has at least about 85% identity with SEQ ID NO: 256. In one embodiment, the genetically engineered bacteria comprise a sequence which has at least about 90% identity with SEQ ID NO: 256. In one embodiment, the genetically engineered bacteria comprise a sequence which has at least about 95% identity with SEQ ID NO: 256. In another embodiment, the bcd2 gene has at least about 96%, 97%, 98%, or 99% identity with SEQ ID NO: 256. Accordingly, in one embodiment, the genetically engineered bacteria comprise a sequence which has at least about 80%, 81%, 82%, 83%, 84%, 85%, 86%, 87%, 88%, 89%, 90%, 91%, 92%, 93%, 94%, 95%, 96%, 97%, 98%, or 99% identity with SEQ ID NO: 256. In another embodiment, the genetically engineered bacteria comprise the sequence of SEQ ID NO: 256. In yet another embodiment the genetically engineered bacteria comprise a sequence which consists of the sequence of SEQ ID NO: 256.

[0418] In one embodiment, one or more polypeptides and/or polynucleotides encoded and expressed by the genetically engineered bacteria have at least about 80% identity with one or more of SEQ ID NO: 84 through SEQ ID NO: 87. In one embodiment, one or more polypeptides and/or polynucleotides encoded and expressed by the genetically engineered bacteria have at least about 85% identity with one or more of SEQ ID NO: 84 through SEQ ID NO: 87. In one embodiment, one or more polypeptides and/or polynucleotides encoded and expressed by the genetically engineered bacteria have at least about 90% identity with one or more of SEQ ID NO: 84 through SEQ ID NO: 87. In one embodiment, one or more polypeptides and/or polynucleotides encoded and expressed by the genetically engineered bacteria have at least about 95% identity with one or more of SEQ ID NO: 84 through SEQ ID NO: 87. In one embodiment, one or more polypeptides and/or polynucleotides encoded and expressed by the genetically engineered bacteria have have at least about 96%, 97%, 98%, or 99% identity with one or more of SEQ ID NO: 84 through SEQ ID NO: 87. Accordingly, in one embodiment, one or more polypeptides and/or polynucleotides expressed by the genetically engineered bacteria have at least about 80%, 81%, 82%, 83%, 84%, 85%, 86%, 87%, 88%, 89%, 90%, 91%, 92%, 93%, 94%, 95%, 96%, 97%, 98%, or 99% identity with one or more of SEQ ID NO: 84 through SEQ ID NO: 87. In another embodiment, one or more polynucleotides and/or polypeptides encoded and expressed by the genetically engineered bacteria comprise the sequence of one or more of SEQ ID NO: 84 through SEQ ID NO: 87. In another embodiment, one or more polynucleotides and/or polypeptides encoded and expressed by the genetically engineered bacteria consist of the sequence of one or more of SEQ ID NO: 84 through SEQ ID NO: 87.

[0419] In some embodiments, the endogenous TnaA polypeptide comprising SEQ ID NO: 88 is mutated or deleted.

[0420] To improve acetate production, while maintaining high levels of tryptophan production, targeted one or more deletions can be introduced in competing metabolic arms of mixed acid fermentation to prevent the production of alternative metabolic fermentative byproducts (thereby increasing acetate production). Non-limiting examples of competing such competing metabolic arms are frdA (converts phosphoenolpyruvate to succinate), ldhA (converts pyruvate to lactate) and adhE (converts Acetyl-CoA to Ethanol). Deletions which may be introduced therefore include deletion of adhE, ldh, and frd. Thus, in certain embodiments, the genetically engineered bacteria comprise one or more tryptophan production cassette(s) and further comprise mutations and/or deletions in one or more of frdA, ldhA, and adhE.

[0421] In some embodiments, the genetically engineered bacteria comprise one or more tryptophan production cassette(s) described herein and one or more mutation(s) and/or deletion(s) in one or more genes selected from the ldhA gene, the frdA gene and the adhE gene.

[0422] In some embodiments, the genetically engineered bacteria comprise one or more gene sequence(s) encoding one or more enzymes described herein for the production of tryptophan and further comprise a mutation and/or deletion in one or more endogenous genes selected from in the ldhA gene, the frdA gene and the adhE genes. In some embodiments, the genetically engineered bacteria comprise one or more gene sequence(s) encoding one or more enzymes described herein for the production of tryptophan and further comprise a mutation and/or deletion in the endogenous ldhA gene. In some embodiments, the genetically engineered bacteria comprise one or more gene sequence(s) encoding one or more enzymes described herein for the production of tryptophan and further comprise a mutation and/or deletion in the endogenous adhE gene. In some embodiments, the genetically engineered bacteria comprise one or more gene sequence(s) encoding one or more enzymes described herein for the production of tryptophan and further comprise a mutation and/or deletion in the endogenous frdA gene. In some embodiments, the genetically engineered bacteria comprise one or more gene sequence(s) encoding one or more enzymes described herein for the production of tryptophan and further comprise a mutation and/or deletion in the endogenous ldhA and rdA genes. In some embodiments, the genetically engineered bacteria comprise one or more gene sequence(s) encoding one or more enzymes described herein for the production of tryptophan and further comprise a mutation and/or deletion in the endogenous ldhA genes and adhE genes. In some embodiments, the genetically engineered bacteria comprise one or more gene sequence(s) encoding one or more enzymes described herein for the production of tryptophan and further comprise a mutation and/or deletion in the endogenous frdA and adhE genes. In some embodiments, the genetically engineered bacteria comprise one or more gene sequence(s) encoding one or more enzymes described herein for the production of tryptophan and further comprise a mutation and/or deletion in the endogenous ldhA, the frdA, and adhE genes. In some embodiments, the genetically engineered bacteria comprise one or more gene sequence(s) encoding one or more enzymes described herein for the production of tryptophan and further comprise a mutation and/or deletion in one or more endogenous genes selected from in the ldhA gene, the frdA gene and the adhE genes.

[0423] In some embodiments, the genetically engineered bacteria comprise one or more gene sequence(s) selected from trpEfbr, trpDCBA, aroGfbr, SerAfbr and ΔtrpR, ΔtnaA, and further comprise a mutation and/or deletion in the endogenous ldhA gene. In some embodiments, the genetically engineered bacteria comprise one or more gene sequence(s) selected from trpEfbr, trpDCBA, aroGfbr, SerAfbr and ΔtrpR, ΔtnaA, and further comprise a mutation and/or deletion in the endogenous adhE gene. In some embodiments, the genetically engineered bacteria comprise one or more gene sequence(s) selected from trpEfbr, trpDCBA, aroGfbr, SerAfbr and ΔtrpR, ΔtnaA, and further comprise a mutation and/or deletion in the endogenous frdA gene. In some embodiments, the genetically engineered bacteria comprise one or more gene sequence(s) selected from trpEfbr, trpDCBA, aroGfbr, SerAfbr and ΔtrpR, ΔtnaA, and further comprise a mutation and/or deletion in the endogenous ldhA and frdA genes. In some embodiments, the genetically engineered bacteria comprise one or more gene sequence(s) selected from trpEfbr, trpDCBA, aroGfbr, SerAfbr and ΔtrpR, ΔtnaA, and further comprise a mutation and/or deletion in the endogenous ldhA genes and adhE genes. In some embodiments, the genetically engineered bacteria comprise one or more gene sequence(s) selected from trpEfbr, trpDCBA, aroGfbr, SerAfbr and ΔtrpR, ΔtnaA, and further comprise a mutation and/or deletion in the endogenous frdA and adhE genes. In some embodiments, the genetically engineered bacteria comprise one or more gene sequence(s) selected from trpEfbr, trpDCBA, aroGfbr, SerAfbr and ΔtrpR, ΔtnaA, and further comprise a mutation and/or deletion in the endogenous ldhA, the frdA, and adhE genes.

[0424] In some embodiments, the genetically engineered bacteria produce 0% to to 2% to 4%, 4% to 6%, 6% to 8%, 8% to 10%, 10% to 12%, 12% to 14%, 14% to 16%, 16% to 18%, 18% to 20%, 20% to 25%, 25% to 30%, 30% to 35%, 35% to 40%, 40% to 45% 45% to 50%, 50% to 55%, 55% to 60%, 60% to 65%, 65% to 70% to 80%, 80% to 90%, or 90% to 100% more acetate than unmodified bacteria of the same bacterial subtype under the same conditions. In yet another embodiment, the genetically engineered bacteria produce 1.0-1.2-fold, 1.2-1.4-fold, 1.4-1.6-fold, 1.6-1.8-fold, 1.8-2-fold, or two-fold more acetate than unmodified bacteria of the same bacterial subtype under the same conditions. In yet another embodiment, the the genetically engineered bacteria produce three-fold, four-fold, five-fold, six-fold, seven-fold, eight-fold, nine-fold, ten-fold, fifteen-fold, twenty-fold, thirty-fold, forty-fold, or fifty-fold, more acetate than unmodified bacteria of the same bacterial subtype under the same conditions.

[0425] In some embodiments, the genetically engineered bacteria produce 0% to 2% to 4%, 4% to 6%, 6% to 8%, 8% to 10%, 10% to 12%, 12% to 14%, 14% to 16%, 16% to 18%, 18% to 20%, 20% to 25%, 25% to 30%, 30% to 35%, 35% to 40%, 40% to 45% 45% to 50%, 50% to 55%, 55% to 60%, 60% to 65%, 65% to 70% to 80%, 80% to 90%, or 90% to 100% more tryptophan than unmodified bacteria of the same bacterial subtype under the same conditions. In yet another embodiment, the genetically engineered bacteria produce 1.0-1.2-fold, 1.2-1.4-fold, 1.4-1.6-fold, 1.6-1.8-fold, 1.8-2-fold, or two-fold more tryptophan than unmodified bacteria of the same bacterial subtype under the same conditions. In yet another embodiment, the the genetically engineered bacteria produce three-fold, four-fold, five-fold, six-fold, seven-fold, eight-fold, nine-fold, ten-fold, fifteen-fold, twenty-fold, thirty-fold, forty-fold, or fifty-fold, more tryptophan than unmodified bacteria of the same bacterial subtype under the same conditions.

[0426] In certain situations, the need may arise to prevent and/or reduce acetate production by of an engineered or naturally occurring strain, e.g., E. coli Nissle, while maintaining high levels of tryptophan production. Without wishing to be bound by theory, one or more mutations and/or deletions in one or more gene(s) encoding in one or more enzymes described herein which function in the acetate producing metabolic arm of fermentation should reduce and/or prevent production of acetate. A non-limiting example of such an enzyme is phosphate acetyltransferase (Pta), which is the first enzyme in the metabolic arm converting acetyl-CoA to acetate. Deletion and/or mutation of the Pta gene or a gene encoding another enzyme in this metabolic arm may also allow for more acetyl-CoA to be used for tryptophan production. Additionally, one or more mutations preventing or reducing the flow through other metabolic arms of mixed acid fermentation, such as those which produce succinate, lactate, and/or ethanol can increase the production of acetyl-CoA, which is available for tryptophan synthesis. Such mutations and/or deletions, include but are not limited to mutations and/or deletions in the frdA, ldhA, and/or adhE genes.

[0427] In some embodiments, the genetically engineered bacteria comprise one or more gene sequence(s) encoding one or more enzymes described herein for the production of tryptophan and further comprise a mutation and/or deletion in the endogenous pta gene. In some embodiments, the genetically engineered bacteria comprise one or more gene sequence(s) encoding one or more enzymes described herein for the production of tryptophan and further comprise a mutation and/or deletion in the endogenous pta gene and in one or more endogenous genes selected from in the ldhA gene, the frdA gene and the adhE gene. In some embodiments, the genetically engineered bacteria comprise one or more gene sequence(s) encoding one or more enzymes described herein for the production of tryptophan and further comprise a mutation in the endogenous pta and adhE genes. In some embodiments, the genetically engineered bacteria comprise one or more gene sequence(s) encoding one or more enzymes described herein for the production of tryptophan and further comprise a mutation in the endogenous pta and ldhA genes. In some embodiments, the genetically engineered bacteria comprise one or more gene sequence(s) encoding one or more enzymes described herein for the production of tryptophan and further comprise a mutation in the endogenous pta and frdA genes. In some embodiments, the genetically engineered bacteria comprise one or more gene sequence(s) encoding one or more enzymes described herein for the production of tryptophan and further comprise a mutation and/or deletion in the endogenous pta, ldhA and frdA genes. In some embodiments, the genetically engineered bacteria comprise one or more gene sequence(s) encoding one or more enzymes described herein for the production of tryptophan and further comprise a mutation in the endogenous pta, ldhA, and adhE genes. In some embodiments, the genetically engineered bacteria comprise one or more gene sequence(s) encoding one or more enzymes described herein for the production of tryptophan and further comprise a mutation in the endogenous pta, frdA and adhE genes. In some embodiments, the genetically engineered bacteria comprise one or more gene sequence(s) encoding one or more enzyme(s) for the production of tryptophan and further comprise a mutation and/or deletion in the endogenous pta, ldhA, frdA, and adhE genes.

[0428] In some embodiments, the genetically engineered bacteria comprise one or more gene sequence(s) selected from trpEfbr, trpDCBA, aroGfbr, SerAfbr and ΔtrpR, ΔtnaA, and further comprise a mutation and/or deletion in the endogenous pta gene. In some embodiments, the genetically engineered bacteria comprise one or more gene sequence(s) selected from trpEfbr, trpDCBA, aroGfbr, SerAfbr and ΔtrpR, ΔtnaA, and further comprise a mutation and/or deletion in the endogenous pta gene and in one or more endogenous genes selected from in the ldhA gene, the frdA gene and the adhE gene. In some embodiments, the genetically engineered bacteria comprise one or more gene sequence(s) selected from trpEfbr, trpDCBA, aroGfbr, SerAfbr and ΔtrpR, ΔtnaA, and further comprise a mutation in the endogenous pta and adhE genes. In some embodiments, the genetically engineered bacteria comprise one or more gene sequence(s) selected from trpEfbr, trpDCBA, aroGfbr, SerAfbr and ΔtrpR, ΔtnaA, and further comprise a mutation in the endogenous pta and ldhA genes.

[0429] In some embodiments, the genetically engineered bacteria comprise one or more gene sequence(s) selected from trpEfbr, trpDCBA, aroGfbr, SerAfbr and ΔtrpR, ΔtnaA, and further comprise a mutation in the endogenous pta and frdA genes. In some embodiments, the genetically engineered bacteria comprise one or more gene sequence(s) selected from trpEfbr, trpDCBA, aroGfbr, SerAfbr and ΔtrpR, ΔtnaA, and further comprise a mutation and/or deletion in the endogenous pta, ldhA and frdA genes. In some embodiments, the genetically engineered bacteria comprise one or more gene sequence(s) selected from trpEfbr, trpDCBA, aroGfbr, SerAfbr and ΔtrpR, ΔtnaA, and further comprise a mutation in the endogenous pta, ldhA, and adhE genes. In some embodiments, the genetically engineered bacteria comprise one or more gene sequence(s) selected from trpEfbr, trpDCBA, aroGfbr, SerAfbr and ΔtrpR, ΔtnaA, and further comprise a mutation in the endogenous pta, frdA and adhE genes. In some embodiments, the genetically engineered bacteria comprise one or more gene sequence(s) selected from trpEfbr, trpDCBA, aroGfbr, SerAfbr and ΔtrpR, ΔtnaA, and further comprise a mutation in the endogenous pta, ldhA, frdA, and adhE genes.

[0430] In some embodiments, the genetically engineered bacteria produce 0% to to 2% to 4%, 4% to 6%, 6% to 8%, 8% to 10%, 10% to 12%, 12% to 14%, 14% to 16%, 16% to 18%, 18% to 20%, 20% to 25%, 25% to 30%, 30% to 35%, 35% to 40%, 40% to 45% 45% to 50%, 50% to 55%, 55% to 60%, 60% to 65%, 65% to 70% to 80%, 80% to 90%, or 90% to 100% less acetate than unmodified bacteria of the same bacterial subtype under the same conditions. In yet another embodiment, the genetically engineered bacteria produce 1.0-1.2-fold, 1.2-1.4-fold, 1.4-1.6-fold, 1.6-1.8-fold, 1.8-2-fold, or two-fold less acetate than unmodified bacteria of the same bacterial subtype under the same conditions. In yet another embodiment, the genetically engineered bacteria produce three-fold, four-fold, five-fold, six-fold, seven-fold, eight-fold, nine-fold, ten-fold, fifteen-fold, twenty-fold, thirty-fold, forty-fold, or fifty-fold, less acetate than unmodified bacteria of the same bacterial subtype under the same conditions.

[0431] In some embodiments, the genetically engineered bacteria produce 0% to to 2% to 4%, 4% to 6%, 6% to 8%, 8% to 10%, 10% to 12%, 12% to 14%, 14% to 16%, 16% to 18%, 18% to 20%, 20% to 25%, 25% to 30%, 30% to 35%, 35% to 40%, 40% to 45% 45% to 50%, 50% to 55%, 55% to 60%, 60% to 65%, 65% to 70% to 80%, 80% to 90%, or 90% to 100% more tryptophan than unmodified bacteria of the same bacterial subtype under the same conditions. In yet another embodiment, the genetically engineered bacteria produce 1.0-1.2-fold, 1.2-1.4-fold, 1.4-1.6-fold, 1.6-1.8-fold, 1.8-2-fold, or two-fold more tryptophan than unmodified bacteria of the same bacterial subtype under the same conditions. In yet another embodiment, the genetically engineered bacteria produce three-fold, four-fold, five-fold, six-fold, seven-fold, eight-fold, nine-fold, ten-fold, fifteen-fold, twenty-fold, thirty-fold, forty-fold, or fifty-fold, more tryptophan than unmodified bacteria of the same bacterial subtype under the same conditions.

[0432] In some embodiments, the genetically engineered bacteria are capable of expressing any one or more of the described circuits in low-oxygen conditions, in the presence of disease or tissue specific molecules or metabolites, in the presence of molecules or metabolites associated with inflammation or an inflammatory response or immune suppression, or in the presence of some other metabolite that may or may not be present in the gut, such as arabinose and others described herein. In some embodiments, the gene sequences(s) are controlled by a constitutive promoter. In some embodiments, the gene sequences(s) are controlled by an inducible and/or constritutive promoter, and are expressed during bacterial culture in vitro, e.g., for bacterial expansion, production and/or manufacture, as described herein.

[0433] n some embodiments, any one or more of the described circuits are present on one or more plasmids (e.g., high copy or low copy) or are integrated into one or more sites in the bacterial chromosome. Also, in some embodiments, the genetically engineered bacteria are further capable of expressing any one or more of the described circuits and further comprise one or more of the following: (1) one or more auxotrophies, such as any auxotrophies known in the art and provided herein, e.g., thyA auxotrophy, (2) one or more kill switch circuits, such as any of the kill-switches described herein or otherwise known in the art, (3) one or more antibiotic resistance circuits, (4) one or more transporters for importing biological molecules or substrates, such any of the transporters described herein or otherwise known in the art, (5) one or more secretion circuits, such as any of the secretion circuits described herein and otherwise known in the art, and (6) combinations of one or more of such additional circuits.

### Producing Kynurenic Acid

[0434] In some embodiments, the genetically engineered bacteria are capable of producing kynurenic acid. Kynurenic acid is produced from the irreversible transamination of kynurenine in a reaction catalyzed by the enzyme kynurenine-oxoglutarate transaminase. Kynurenic acid acts as an antagonist of ionotropic glutamate receptors (Turski et al., 2013). While glutamate is known to be a major excitatory neurotransmitter in the central nervous system, there is now evidence to suggest an additional role for glutamate in the peripheral nervous system. For example, the activation of NMDA glutamate receptors in the major nerve supply to the GI tract (i.e., the myenteric plexus) leads to an increase in gut motility (Forrest et al., 2003), but rats treated with kynurenic acid exhibit decreased gut motility and inflammation in the early phase of acute colitis (Varga et al., 2010). Thus, the elevated levels of kynurenic acid reported in IBD patients may represent a compensatory response to the increased activation of enteric neurons (Forrest et al., 2003). The genetically engineered bacteria may comprise any suitable gene or genes for producing kynurenic acid. In some embodiments, the engineered bacteria comprise gene sequence(s) encoding one or more kynurenine-oxoglutarate transaminases (also referred to as kynurenine aminotransferases (e.g., KAT I, II, III)).

[0435] In some embodiments, the gene or genes for producing kynurenic acid is modified and/or mutated, e.g., to enhance stability, increase kynurenic acid production under inducing conditions. In some embodiments, the genetically engineered bacteria are capable of producing kynurenic acid under inducing conditions, e.g., under a condition(s) associated with inflammation. In some embodiments, the genetically engineered bacteria are capable of producing kynurenic acid in low-oxygen conditions, in the presence of certain molecules or metabolites, in the presence of molecules or metabolites associated with inflammation or an inflammatory response, or in the presence of some other metabolite that may or may not be present in the gut, such as arabinose. In some embodiments, the gene sequences(s) are controlled by a constitutive promoter. In some embodiments, the gene sequences(s) are controlled by an inducible promoter. In some embodiments, the gene sequences(s) are controlled by an inducible and/or constitutive promoter, and are expressed during bacterial culture in vitro, e.g., for bacterial expansion, production and/or manufacture, as described herein.

[0436] In some embodiments, the genetically engineered bacteria comprising one or more gene(s) or gene cassette(s) can alter the TRP:KYNA ratio, e.g. in the circulation. In some embodiments the TRP:KYNA ratio is increased. In some embodiments, TRP:KYNA ratio is decreased.

[0437] In some embodiments, the genetically engineered bacteria comprise one or more gene(s) or gene cassette(s) for the consumption of tryptophan and production of kynurenic acid, which are bacterially derived. In some embodiments, the enzymes for producing kynureic acid are derived from one or more of Pseudomonas, Xanthomonas, Burkholderia, Stenotrophomonas, Shewanella, and Bacillus, and/or members of the families Rhodobacteraceae, Micrococcaceae, and Halomonadaceae, In some embodiments the enzymes are derived from the species listed in table S7 of Vujkovic-Cvijin et al. (Dysbiosis of the gut microbiota is associated with HIV disease progression and tryptophan catabolism Sci Transl Med. 2013 Jul. 10; 5(193): 193ra91), the contents of which is herein incorporated by reference in its entirety.

[0438] In some embodiments, the genetically engineered bacteria comprise gene sequence(s) encoding one or more tryptophan transporters and gene sequence(s) encoding kynureninase. In some embodiments, the genetically engineered bacteria comprise gene sequence(s) encoding one or more tryptophan transporters and gene sequence(s) encoding one or more kynurenine-oxoglutarate transaminases (kynurenine aminotransferases). In some embodiments, the genetically engineered bacteria comprise gene sequence(s) encoding one or more tryptophan transporters, gene sequence(s) encoding kynureninase, and gene sequence(s) encoding one or more kynurenine-oxoglutarate transaminases (kynurenine aminotransferases). In some embodiments, the genetically engineered bacteria comprise gene sequence(s) encoding kynureninase and gene sequence(s) encoding one or more kynurenine aminotransferases.

[0439] In one embodiment, the genetically engineered bacteria comprise one or more gene sequence(s) which encode one or more tryptophan catabolism enzymes, which produce kynurenic acid from tryptophan. Non-limiting example of such gene sequence(s) are shown in the figures and described elsewhere herein. In one embodiment, the genetically engineered bacteria comprise one or more gene sequence(s) which encode IDO1 (indoleamine 2,3-dioxygenase). In one embodiment, the genetically engineered bacteria comprise one or more gene sequence(s) which encode IDO1 from Homo sapiens. In one embodiment, the genetically engineered bacteria comprise one or more gene sequence(s) which encode TDO2 (tryptophan 2,3-dioxygenase). In one embodiment, the genetically engineered bacteria comprise one or more gene sequence(s) which encode TDO2 from Homo sapiens. In one embodiment, the genetically engineered bacteria comprise one or more gene sequence(s) which encode BNA2 (indoleamine 2,3-dioxygenase). In one embodiment, the genetically engineered bacteria comprise one or more gene sequence(s) which encode BNA2 from S. cerevisiae). In one embodiment, the genetically engineered bacteria comprise one or more gene sequence(s) which encode Afmid: Kynurenine formamidase. In one embodiment, the genetically engineered bacteria comprise one or more gene sequence(s) which encode Afmid: Kynurenine formamidase from mouse. In one embodiment, the genetically engineered bacteria comprise one or more gene sequence(s) which encode Afmid in combination with one or more of ido1 and/or tdo2 and/or bna2. In one embodiment, the genetically engineered bacteria comprise one or more gene sequence(s) which encode Afmid in combination with IDO. In one embodiment, the genetically engineered bacteria comprise one or more gene sequence(s) which encode BNA2 in combination with TDO2. In one embodiment, the genetically engineered bacteria comprise one or more gene sequence(s) which encode Afmid in combination with bna2. In one embodiment, the genetically engineered bacteria further comprise one or more gene sequence(s) which encode cclb1 and/or cclb2 and/or aadat and/or got2. In one embodiment, the genetically engineered bacteria comprise one or more gene sequence(s) which encode BNA3 (kynurenine-oxoglutarate transaminase. In one embodiment, the genetically engineered bacteria comprise one or more gene sequence(s) which encode BNA3 from S. cerevisae. In one embodiment, the genetically engineered bacteria comprise one or more gene sequence(s) which encode BNA2 in combination with one or more of ido1 and/or tdo2 and/or bna2. In one embodiment, the genetically engineered bacteria comprise one or more gene sequence(s) which encode BNA2 in combination with ido1. In one embodiment, the genetically engineered bacteria comprise one or more gene sequence(s) which encode BNA2 in combination with tdo2. In one embodiment, the genetically engineered bacteria comprise one or more gene sequence(s) which encode BNA2 in combination with bna2. In one embodiment, the genetically engineered bacteria further comprise one or more gene sequence(s) which encode cclb1 and/or cclb2 and/or aadat and/or got2. In one embodiment, the genetically engineered bacteria comprise one or more gene sequence(s) which encode one or more of ido1 and/or tdo2 and/or bna2.

[0440] In one embodiment, the genetically engineered bacteria comprise one or more gene sequence(s) which encode one or more of afmid and/or bna3. In one embodiment, the genetically engineered bacteria comprise one or more gene sequence(s) which encode one or more of ido1 and/or tdo2 and/or bna2, in combination with one or more of afmid and/or bna3. In one embodiment, the genetically engineered bacteria comprise one or more gene sequence(s) which encode GOT2 (Aspartate aminotransferase, mitochondrial). In one embodiment, the genetically engineered bacteria comprise one or more gene sequence(s) which encode GOT2 from Homo sapiens. In one embodiment, the genetically engineered bacteria comprise one or more gene sequence(s) which encode AADAT (Kynurenine/alpha-aminoadipate aminotransferase, mitochondrial). In one embodiment, the genetically engineered bacteria comprise one or more gene sequence(s) which encode AADAT from Homo sapiens. In one embodiment, the genetically engineered bacteria comprise one or more gene sequence(s) which encode CCLB1 (Kynurenine-oxoglutarate transaminase). In one embodiment, the genetically engineered bacteria comprise one or more gene sequence(s) which encode CCLB1 from Homo sapiens). In one embodiment, the genetically engineered bacteria comprise one or more gene sequence(s) which encode CCLB2 (kynurenine-oxoglutarate transaminase 3) In one embodiment, the genetically engineered bacteria comprise one or more gene sequence(s) which encode CCLB2 from Homo sapiens. In one embodiment, the genetically engineered bacteria comprise one or more gene sequence(s) which encode cclb1 and/or cclb2 and/or aadat and/or got2. In one embodiment, the genetically engineered bacteria comprise one or more gene sequence(s) which encode one or more of ido1 and/or tdo2 and/or bna2, in combination with one or more of afmid and/or bna3, and in combination with one or more of cclb1 and/or cclb2 and/or aadat and/or got2.

[0441] In any of these embodiments, the genetically engineered bacteria which produce kynurenic acid from tryptophan also optionally comprise one or more gene sequence(s) comprising one or more enzymes for tryptophan production, and gene deletions/or mutations as depicted and described in the figures and the examples and described elsewhere herein. In some embodiments, the genetically engineered bacteria which produce kynurenic acid from tryptophan also optionally comprise one or more gene sequence(s) which encode one or more transporter(s) as described herein, through which tryptophan can be imported. Optionally, in some embodiments, the genetically engineered bacteria which produce kynurenic acid from tryptophan also optionally comprise one or more gene sequence(s) which encode an exporter as described herein, which can export tryptophan or any of its metabolites.

[0442] In some embodiments, the one or more genes for producing kynurenic acid are modified and/or mutated, e.g., to enhance stability, increase kynurenic acid production under inducing conditions. In some embodiments, the engineered bacteria have enhanced uptake or import of tryptophan, e.g., comprise a transporter or other mechanism for increasing the uptake of tryptophan into the bacterial cell.

[0443] To improve acetate production, while maintaining high levels of kynurenic acid production, targeted one or more deletions can be introduced in competing metabolic arms of mixed acid fermentation to prevent the production of alternative metabolic fermentative byproducts (thereby increasing acetate production). Non-limiting examples of competing such competing metabolic arms are frdA (converts phosphoenolpyruvate to succinate), ldhA (converts pyruvate to lactate) and adhE (converts Acetyl-CoA to Ethanol). Deletions which may be introduced therefore include deletion of adhE, ldh, and frd. Thus, in certain embodiments, the genetically engineered bacteria comprise one or more kynurenic acid production cassette(s) and further comprise mutations and/or deletions in one or more of frdA, ldhA, and adhE.

[0444] In some embodiments, the genetically engineered bacteria comprise one or more kynurenic acid production cassette(s) described herein and one or more mutation(s) and/or deletion(s) in one or more genes selected from the ldhA gene, the frdA gene and the adhE gene.

[0445] In some embodiments, the genetically engineered bacteria comprise one or more gene sequence(s) encoding one or more enzymes described herein for the production of kynurenic acid and further comprise a mutation and/or deletion in one or more endogenous genes selected from in the ldhA gene, the frdA gene and the adhE genes. In some embodiments, the genetically engineered bacteria comprise one or more gene sequence(s) encoding one or more enzymes described herein for the production of kynurenic acid and further comprise a mutation and/or deletion in the endogenous ldhA gene. In some embodiments, the genetically engineered bacteria comprise one or more gene sequence(s) encoding one or more enzymes described herein for the production of kynurenic acid and further comprise a mutation and/or deletion in the endogenous adhE gene. In some embodiments, the genetically engineered bacteria comprise one or more gene sequence(s) encoding one or more enzymes described herein for the production of kynurenic acid and further comprise a mutation and/or deletion in the endogenous frdA gene. In some embodiments, the genetically engineered bacteria comprise one or more gene sequence(s) encoding one or more enzymes described herein for the production of kynurenic acid and further comprise a mutation and/or deletion in the endogenous ldhA and rdA genes. In some embodiments, the genetically engineered bacteria comprise one or more gene sequence(s) encoding one or more enzymes described herein for the production of kynurenic acid and further comprise a mutation and/or deletion in the endogenous ldhA genes and adhE genes. In some embodiments, the genetically engineered bacteria comprise one or more gene sequence(s) encoding one or more enzymes described herein for the production of kynurenic acid and further comprise a mutation and/or deletion in the endogenous frdA and adhE genes. In some embodiments, the genetically engineered bacteria comprise one or more gene sequence(s) encoding one or more enzymes described herein for the production of kynurenic acid and further comprise a mutation and/or deletion in the endogenous ldhA, the frdA, and adhE genes. In some embodiments, the genetically engineered bacteria comprise one or more gene sequence(s) encoding one or more enzymes described herein for the production of kynurenic acid and further comprise a mutation and/or deletion in one or more endogenous genes selected from in the ldhA gene, the frdA gene and the adhE genes.

[0446] In some embodiments, the genetically engineered bacteria produce 0% to to 2% to 4%, 4% to 6%, 6% to 8%, 8% to 10%, 10% to 12%, 12% to 14%, 14% to 16%, 16% to 18%, 18% to 20%, 20% to 25%, 25% to 30%, 30% to 35%, 35% to 40%, 40% to 45% 45% to 50%, 50% to 55%, 55% to 60%, 60% to 65%, 65% to 70% to 80%, 80% to 90%, or 90% to 100% more acetate than unmodified bacteria of the same bacterial subtype under the same conditions. In yet another embodiment, the genetically engineered bacteria produce 1.0-1.2-fold, 1.2-1.4-fold, 1.4-1.6-fold, 1.6-1.8-fold, 1.8-2-fold, or two-fold more acetate than unmodified bacteria of the same bacterial subtype under the same conditions. In yet another embodiment, the the genetically engineered bacteria produce three-fold, four-fold, five-fold, six-fold, seven-fold, eight-fold, nine-fold, ten-fold, fifteen-fold, twenty-fold, thirty-fold, forty-fold, or fifty-fold, more acetate than unmodified bacteria of the same bacterial subtype under the same conditions.

[0447] In some embodiments, the genetically engineered bacteria produce 0% to 2% to 4%, 4% to 6%, 6% to 8%, 8% to 10%, 10% to 12%, 12% to 14%, 14% to 16%, 16% to 18%, 18% to 20%, 20% to 25%, 25% to 30%, 30% to 35%, 35% to 40%, 40% to 45% 45% to 50%, 50% to 55%, 55% to 60%, 60% to 65%, 65% to 70% to 80%, 80% to 90%, or 90% to 100% more kynurenic acid than unmodified bacteria of the same bacterial subtype under the same conditions. In yet another embodiment, the genetically engineered bacteria produce 1.0-1.2-fold, 1.2-1.4-fold, 1.4-1.6-fold, 1.6-1.8-fold, 1.8-2-fold, or two-fold more kynurenic acid than unmodified bacteria of the same bacterial subtype under the same conditions. In yet another embodiment, the the genetically engineered bacteria produce three-fold, four-fold, five-fold, six-fold, seven-fold, eight-fold, nine-fold, ten-fold, fifteen-fold, twenty-fold, thirty-fold, forty-fold, or fifty-fold, more kynurenic acid than unmodified bacteria of the same bacterial subtype under the same conditions.

[0448] In certain situations, the need may arise to prevent and/or reduce acetate production by of an engineered or naturally occurring strain, e.g., E. coli Nissle, while maintaining high levels of kynurenic acid production. Without wishing to be bound by theory, one or more mutations and/or deletions in one or more gene(s) encoding in one or more enzymes described herein which function in the acetate producing metabolic arm of fermentation should reduce and/or prevent production of acetate. A non-limiting example of such an enzyme is phosphate acetyltransferase (Pta), which is the first enzyme in the metabolic arm converting acetyl-CoA to acetate. Deletion and/or mutation of the Pta gene or a gene encoding another enzyme in this metabolic arm may also allow for more acetyl-CoA to be used for kynurenic acid production. Additionally, one or more mutations preventing or reducing the flow through other metabolic arms of mixed acid fermentation, such as those which produce succinate, lactate, and/or ethanol can increase the production of acetyl-CoA, which is available for kynurenic acid synthesis. Such mutations and/or deletions, include but are not limited to mutations and/or deletions in the frdA, ldhA, and/or adhE genes.

[0449] In some embodiments, the genetically engineered bacteria comprise one or more gene sequence(s) encoding one or more enzymes described herein for the production of kynurenic acid and further comprise a mutation and/or deletion in the endogenous pta gene. In some embodiments, the genetically engineered bacteria comprise one or more gene sequence(s) encoding one or more enzymes described herein for the production of kynurenic acid and further comprise a mutation and/or deletion in the endogenous pta gene and in one or more endogenous genes selected from in the ldhA gene, the frdA gene and the adhE gene. In some embodiments, the genetically engineered bacteria comprise one or more gene sequence(s) encoding one or more enzymes described herein for the production of kynurenic acid and further comprise a mutation in the endogenous pta and adhE genes. In some embodiments, the genetically engineered bacteria comprise one or more gene sequence(s) encoding one or more enzymes described herein for the production of kynurenic acid and further comprise a mutation in the endogenous pta and ldhA genes. In some embodiments, the genetically engineered bacteria comprise one or more gene sequence(s) encoding one or more enzymes described herein for the production of kynurenic acid and further comprise a mutation in the endogenous pta and frdA genes. In some embodiments, the genetically engineered bacteria comprise one or more gene sequence(s) encoding one or more enzymes described herein for the production of kynurenic acid and further comprise a mutation and/or deletion in the endogenous pta, ldhA and frdA genes. In some embodiments, the genetically engineered bacteria comprise one or more gene sequence(s) encoding one or more enzymes described herein for the production of kynurenic acid and further comprise a mutation in the endogenous pta, ldhA, and adhE genes. In some embodiments, the genetically engineered bacteria comprise one or more gene sequence(s) encoding one or more enzymes described herein for the production of kynurenic acid and further comprise a mutation in the endogenous pta, frdA and adhE genes. In some embodiments, the genetically engineered bacteria comprise one or more gene sequence(s) encoding one or more enzyme(s) for the production of kynurenic acid and further comprise a mutation and/or deletion in the endogenous pta, ldhA, frdA, and adhE genes.

[0450] In some embodiments, the genetically engineered bacteria produce 0% to to 2% to 4%, 4% to 6%, 6% to 8%, 8% to 10%, 10% to 12%, 12% to 14%, 14% to 16%, 16% to 18%, 18% to 20%, 20% to 25%, 25% to 30%, 30% to 35%, 35% to 40%, 40% to 45% 45% to 50%, 50% to 55%, 55% to 60%, 60% to 65%, 65% to 70% to 80%, 80% to 90%, or 90% to 100% less acetate than unmodified bacteria of the same bacterial subtype under the same conditions. In yet another embodiment, the genetically engineered bacteria produce 1.0-1.2-fold, 1.2-1.4-fold, 1.4-1.6-fold, 1.6-1.8-fold, 1.8-2-fold, or two-fold less acetate than unmodified bacteria of the same bacterial subtype under the same conditions. In yet another embodiment, the genetically engineered bacteria produce three-fold, four-fold, five-fold, six-fold, seven-fold, eight-fold, nine-fold, ten-fold, fifteen-fold, twenty-fold, thirty-fold, forty-fold, or fifty-fold, less acetate than unmodified bacteria of the same bacterial subtype under the same conditions.

[0451] In some embodiments, the genetically engineered bacteria produce 0% to to 2% to 4%, 4% to 6%, 6% to 8%, 8% to 10%, 10% to 12%, 12% to 14%, 14% to 16%, 16% to 18%, 18% to 20%, 20% to 25%, 25% to 30%, 30% to 35%, 35% to 40%, 40% to 45% 45% to 50%, 50% to 55%, 55% to 60%, 60% to 65%, 65% to 70% to 80%, 80% to 90%, or 90% to 100% more kynurenic acid than unmodified bacteria of the same bacterial subtype under the same conditions. In yet another embodiment, the genetically engineered bacteria produce 1.0-1.2-fold, 1.2-1.4-fold, 1.4-1.6-fold, 1.6-1.8-fold, 1.8-2-fold, or two-fold more kynurenic acid than unmodified bacteria of the same bacterial subtype under the same conditions. In yet another embodiment, the genetically engineered bacteria produce three-fold, four-fold, five-fold, six-fold, seven-fold, eight-fold, nine-fold, ten-fold, fifteen-fold, twenty-fold, thirty-fold, forty-fold, or fifty-fold, more kynurenic acid than unmodified bacteria of the same bacterial subtype under the same conditions.

[0452] In some embodiments, the genetically engineered bacteria are capable of producing kynurenic acid under inducing conditions, e.g., under a condition(s) associated with inflammation. In some embodiments, the genetically engineered bacteria are capable of producing kynurenic acid in low-oxygen conditions, in the presence of certain molecules or metabolites, in the presence of molecules or metabolites associated with inflammation or an inflammatory response, or in the presence of some other metabolite that may or may not be present in the gut, such as arabinose.

[0453] In some embodiments, the gene sequences(s) are controlled by an inducible promoter. In some embodiments, the gene sequences(s) are controlled by a constitutive promoter. In some embodiments, the gene sequences(s) are controlled by an inducible and/or constritutive promoter, and are expressed during bacterial culture in vitro, e.g., for bacterial expansion, production and/or manufacture, as described herein.

[0454] In some embodiments, the genetically engineered bacteria are capable of expressing any one or more of the described circuits in low-oxygen conditions, in the presence of disease or tissue specific molecules or metabolites, in the presence of molecules or metabolites associated with inflammation or an inflammatory response or immune suppression or in the presence of some other metabolite that may or may not be present in the gut, such as arabinose and others described herein. In some embodiments, any one or more of the described circuits are present on one or more plasmids (e.g., high copy or low copy) or are integrated into one or more sites in the bacterial chromosome. Also, in some embodiments, the genetically engineered bacteria are further capable of expressing any one or more of the described circuits and further comprise one or more of the following: (1) one or more auxotrophies, such as any auxotrophies known in the art and provided herein, e.g., thyA auxotrophy, (2) one or more kill switch circuits, such as any of the kill-switches described herein or otherwise known in the art, (3) one or more antibiotic resistance circuits, (4) one or more transporters for importing biological molecules or substrates, such any of the transporters described herein or otherwise known in the art, (5) one or more secretion circuits, such as any of the secretion circuits described herein and otherwise known in the art, and (6) combinations of one or more of such additional circuits.

[0455] Producing Indole Tryptophan Metabolites and Tryptamine

[0456] In some embodiments, the genetically engineered bacteria comprise genetic circuits for the production of indole metabolites and/or tryptamine. Exemplary circuits for the production of indole metabolites/derivatives are shown in the figures.

[0457] In some embodiments, the genetically engineered bacteria comprise genetic circuitry for converting tryptophan to tryptamine. In some embodiments, the engineered bacteria comprise gene sequence encoding Tryptophan decarboxylase, e.g., from Catharanthus roseus. In some embodiments, the engineered bacteria comprise genetic circuitry for producing indole-3-acetaldehyde and FICZ from tryptophan. In some embodiments, the genetically engineered bacteria comprise gene sequence encoding one or more of the following: aro9 (L-tryptophan aminotransferase, e.g., from S. cerevisae), aspC (aspartate aminotransferase, e.g., from E. coli, taa1 (L-tryptophan-pyruvate aminotransferase, e.g., from Arabidopsis thaliana), staO (L-tryptophan oxidase, e.g., from Streptomyces sp. TP-A0274), trpDH (Tryptophan dehydrogenase, e.g., from Nostoc punctiforme NIES-2108) and ipdC (Indole-3-pyruvate decarboxylase, e.g., from Enterobacter cloacae). In some embodiments, the genetically engineered bacteria comprise gene sequence encoding one or more of the following: tdc (Tryptophan decarboxylase, e.g., from Catharanthus roseus and/or Clostridium sporogenes), and tynA (Monoamine oxidase, e.g., from E. coli). In some embodiments, the engineered bacteria comprise genetic circuitry for producing indole-3-acetonitrile from tryptophan. In some embodiments, the genetically engineered bacteria comprise gene sequence encoding one or more of the following: cyp79B2, (tryptophan N-monooxygenase, e.g., from Arabidopsis thaliana), cyp79B3 (tryptophan N-monooxygenase, e.g., from Arabidopsis thaliana). In some embodiments, the engineered bacteria comprise genetic circuitry for producing kynurenine from tryptophan. In some embodiments, the genetically engineered bacteria comprise gene sequence encoding one or more of the following: IDO1 (indoleamine 2,3-dioxygenase, e.g., from Homo sapiens or TDO2 (tryptophan 2,3-dioxygenase, e.g., from Homo sapiens), BNA2 (indoleamine 2,3-dioxygenase, e.g., from S. cerevisiae) and Afmid: Kynurenine formamidase, e.g., from mouse), BNA3 (kynurenine-oxoglutarate transaminase, e.g., from S. cerevisae). In some embodiments, the engineered bacteria comprise genetic circuitry for producing kynureninic acid from tryptophan. In some embodiments, the genetically engineered bacteria comprise gene sequence encoding one or more of the following: IDO1 (indoleamine 2,3-dioxygenase, e.g., from Homo sapiens or TDO2 (tryptophan 2,3-dioxygenase, e.g., from Homo sapiens), BNA2 (indoleamine 2,3-dioxygenase, e.g., from S. cerevisiae) and Afmid: Kynurenine formamidase, e.g., from mouse), BNA3 (kynurenine-oxoglutarate transaminase, e.g., from S. cerevisae) and GOT2 (Aspartate aminotransferase, mitochondrial, e.g., from Homo sapiens or AADAT (Kynurenine/alpha-aminoadipate aminotransferase, mitochondrial, e.g., from Homo sapiens), or CCLB1 (Kynurenine-oxoglutarate transaminase 1, e.g., from Homo sapiens) or CCLB2 (kynurenine-oxoglutarate transaminase 3, e.g., from Homo sapiens. In some embodiments, the engineered bacteria comprise genetic circuitry for producing indole from tryptophan. In some embodiments, the genetically engineered bacteria comprise gene sequence encoding one or more of the following: tnaA (tryptophanase, e.g., from E. coli). In some embodiments, the engineered bacteria comprise genetic circuitry for producing indole-3-carbinol, indole-3-aldehyde, 3,3′ diindolylmethane (DIM), indolo(3,2-b) carbazole (ICZ) from indole glucosinolate (taken up through the diet). The genetically engineered bacteria comprise a gene sequence encoding pne2 (myrosinase, e.g., from Arabidopsis thaliana). In some embodiments, the engineered bacteria comprise genetic circuitry for producing indole-3-acetic acid from tryptophan. In some embodiments, the genetically engineered bacteria comprise gene sequence encoding one or more of the following: aro9 (L-tryptophan aminotransferase, e.g., from S. cerevisae), aspC (aspartate aminotransferase, e.g., from E. coli, taa1 (L-tryptophan-pyruvate aminotransferase, e.g., from Arabidopsis thaliana), staO (L-tryptophan oxidase, e.g., from Streptomyces sp. TP-A0274), trpDH (Tryptophan dehydrogenase, e.g., from Nostoc punctiforme NIES-2108), ipdC (Indole-3-pyruvate decarboxylase, e.g., from Enterobacter cloacae), iad1 (Indole-3-acetaldehyde dehydrogenase, e.g., from Ustilago maydis), AAO1 (Indole-3-acetaldehyde oxidase, e.g., from Arabidopsis thaliana). In some embodiments, the genetically engineered bacteria comprise gene sequence encoding one or more of the following: tdc (Tryptophan decarboxylase, e.g., from Catharanthus roseus and/or Clostridium sporogenes), tynA (Monoamine oxidase, e.g., from E. coli), iad1 (Indole-3-acetaldehyde dehydrogenase, e.g., from Ustilago maydis), AAO1 (Indole-3-acetaldehyde oxidase, e.g., from Arabidopsis thaliana). In some embodiments, the genetically engineered bacteria comprise gene sequence encoding one or more of the following: aro9 (L-tryptophan aminotransferase, e.g., from S. cerevisae), aspC (aspartate aminotransferase, e.g., from E. coli, taa1 (L-tryptophan-pyruvate aminotransferase, e.g., from Arabidopsis thaliana), staO (L-tryptophan oxidase, e.g., from Streptomyces sp. TP-A0274), trpDH (Tryptophan dehydrogenase, e.g., from Nostoc punctiforme NIES-2108) and yuc2 (indole-3-pyruvate monoxygenase, e.g., from Arabidopsis thaliana). In some embodiments, the genetically engineered bacteria comprise gene sequence encoding one or more of the following: IaaM (Tryptophan 2-monooxygenase e.g., from Pseudomonas savastanoi), iaaH (Indoleacetamide hydrolase, e.g., from Pseudomonas savastanoi). In some embodiments, the genetically engineered bacteria comprise gene sequence encoding one or more of the following: cyp79B2 (tryptophan N-monooxygenase, e.g., from Arabidopsis thaliana), cyp79B3 (tryptophan N-monooxygenase, e.g., from Arabidopsis thaliana, cyp71a13 (indoleacetaldoxime dehydratase, e.g., from Arabidopsis thaliana), nit1 (Nitrilase, e.g., from Arabidopsis thaliana), iaaH (Indoleacetamide hydrolase, e.g., from Pseudomonas savastanoi). In some embodiments, the genetically engineered bacteria comprises trpDH (Tryptophan dehydrogenase, e.g., from Nostoc punctiforme NIES-2108), ipdC (Indole-3-pyruvate decarboxylase, e.g., from Enterobacter cloacae) which together produce indole-3-acetaldehyde and FICZ though an (indol-3yl)pyruvate intermediate, and iad1 (Indole-3-acetaldehyde dehydrogenase, e.g., from Ustilago maydis), which converts indole-3-acetaldehyde into indole-3-acetate

[0458] In some embodiments, the genetically engineered bacteria comprise genetic circuits for the production of tryptophan, tryptamine, indole acetic acid, and indole propionic acid. In some embodiments, the engineered bacteria produces tryptamine. Tryptophan is optionally produced from chorismate precursor, and the bacteria optionally comprises circuits as depicted and/or described in FIG. 40A and/or FIG. 40B and/or FIG. 40C and/or FIG. 40D. Additionally, the bacteria comprises tdc (tryptophan decarboxylase, e.g., from Catharanthus roseus and/or Clostridium sporogenes), which converts tryptophan into tryptamine.

[0459] In some embodiments, the engineered bacteria comprise genetic circuits for the production of indole-3-acetate. Tryptophan is optionally produced from chorismate precursor, and the strain optionally comprises circuits as depicted and/or described in FIG. 40A and/or FIG. 40B and/or FIG. 40C and/or FIG. 40D. Additionally, the strain comprises trpDH (Tryptophan dehydrogenase, e.g., from Nostoc punctiforme NIES-2108) and ipdC (Indole-3-pyruvate decarboxylase, e.g., from Enterobacter cloacae) which together produce indole-3-acetaldehyde and FICZ though an (indol-3yl)pyruvate intermediate, and iad1 (Indole-3-acetaldehyde dehydrogenase, e.g., from Ustilago maydis), which converts indole-3-acetaldehyde into indole-3-acetate.

[0460] In some embodiments, the engineered bacteria comprise genetic circuits for the production of indole-3-propionate. Tryptophan is optionally produced from chorismate precursor, and the strain optionally comprises circuits as depicted and/or described in FIG. 40A and/or FIG. 40B and/or FIG. 40C and/or FIG. 40D. Additionally, the strain comprises a circuit as described in FIG. 48, comprising trpDH (Tryptophan dehydrogenase, e.g., from Nostoc punctiforme NIES-2108, which produces (indol-3yl)pyruvate from tryptophan), fldA (indole-3-propionyl-CoA:indole-3-lactate CoA transferase, e.g., from Clostridium sporogenes, which converts converts indole-3-lactate and indol-3-propionyl-CoA to indole-3-propionic acid and indole-3-lactate-CoA), fldB and fldC (indole-3-lactate dehydratase e.g., from Clostridium sporogenes, which converts indole-3-lactate-CoA to indole-3-acrylyl-CoA) fldD and/or AcuI: (indole-3-acrylyl-CoA reductase, e.g., from Clostridium sporogenes and/or acrylyl-CoA reductase, e.g., from Rhodobacter sphaeroides, which convert indole-3-acrylyl-CoA to indole-3-propionyl-CoA). The circuits further comprise fldH1 and/or fldH2 (indole-3-lactate dehydrogenase 1 and/or 2, e.g., from Clostridium sporogenes), which converts (indol-3-yl)pyruvate into indole-3-lactate).

[0461] In some embodiments, the engineered bacteria comprises genetic circuitry for the production of indole-3-propionic acid (IPA). In some embodiments, the engineered bacteria comprises gene sequence encoding tryptophan ammonia lyase and an indole-3-acrylate reductase (e.g., Tryptophan ammonia lyase (WAL) (e.g., from Rubrivivax benzoatilyticus) and indole-3-acrylate reductase (e.g., from Clostridium botulinum). Tryptophan ammonia lyase converts tryptophan to indole-3-acrylic acid, and indole-3-acrylate reductase converts indole-3-acrylic acid into IPA. Without wishing to be bound by theory, no oxygen is needed for this reaction, allowing it to proceed under low or no oxygen conditions, e.g., as those found in the mammalian gut. In some embodiments, the genetically engineered bacteria further comprise one or more circuits for the production of tryptophan, e.g., as shown in FIG. 40 (A-D) and FIG. 44 and as described elsewhere herein. In some embodiments, AroG and/or TrpE are replaced with feedback resistant versions to improve tryptophan production in the genetically engineered bacteria. In some embodiments, trpR and/or the tnaA gene (encoding a tryptophanase converting tryptophan into indole) are deleted to further increase levels of tryptophan produced.

[0462] In some embodiments, the engineered bacteria comprise genetic circuitry for producing indole-3-propionic acid (IPA), indole acetic acid (IAA), and/or tryptamine synthesis (TrA) circuits. In some embodiments, the engineered bacteria comprise gene sequence encoding one or more of the following: TrpDH: tryptophan dehydrogenase, e.g., from from Nostoc punctiforme NIES-2108; FldH1/FldH2: indole-3-lactate dehydrogenase, e.g., from Clostridium sporogenes; FldA: indole-3-propionyl-CoA:indole-3-lactate CoA transferase, e.g., from Clostridium sporogenes; FldBC: indole-3-lactate dehydratase, e.g., from Clostridium sporogenes; FldD: indole-3-acrylyl-CoA reductase, e.g., from Clostridium sporogenes; AcuI: acrylyl-CoA reductase, e.g., from Rhodobacter sphaeroides. lpdC: Indole-3-pyruvate decarboxylase, e.g., from Enterobacter cloacae; lad1: Indole-3-acetaldehyde dehydrogenase, e.g., from Ustilago maydis; Tdc: Tryptophan decarboxylase, e.g., from Catharanthus roseus or from Clostridium sporogenes.

[0463] In some embodiments, the engineered bacteria comprise genetic circuitry for producing (indol-3-yl)pyruvate (IPyA). In some embodiments, the engineered bacteria comprise gene sequence encoing one or more of the following: tryptophan dehydrogenase (EC 1.4.1.19) (enzyme that catalyzes the reversible chemical reaction converting L-tryptophan, NAD(P) and water to (indol-3-yl)pyruvate (IPyA), NH₃, NAD(P)H and H⁺)); Indole-3-lactate dehydrogenase ((EC 1.1.1.110, e.g., Clostridium sporogenes or Lactobacillus casei) (converts (indol-3yl)pyruvate (IpyA) and NADH and H+ to indole-3-lactate (ILA) and NAD+); Indole-3-propionyl-CoA:indole-3-lactate CoA transferase (FldA) (converts indole-3-lactate (ILA) and indol-3-propionyl-CoA to indole-3-propionic acid (IPA) and indole-3-lactate-CoA); Indole-3-acrylyl-CoA reductase (FldD) and acrylyl-CoA reductase (AcuI) (convert indole-3-acrylyl-CoA to indole-3-propionyl-CoA); Indole-3-lactate dehydratase (FldBC) (converts indole-3-lactate-CoA to indole-3-acrylyl-CoA); Indole-3-pyruvate decarboxylase (lpdC:) (converts Indole-3-pyruvic acid (IPyA) into Indole-3-acetaldehyde (IAAld)); lad1: Indole-3-acetaldehyde dehydrogenase (coverts Indole-3-acetaldehyde (IAAld) into Indole-3-acetic acid (IAA)); Tdc: Tryptophan decarboxylase (converts tryptophan (Trp) into tryptamine (TrA)). In some embodiments, the genetically engineered bacteria further comprise one or more circuits for the production of tryptophan, e.g., as shown in FIG. 40 (A-D) and FIG. 44 and as described elsewhere herein. In some embodiments, AroG and/or TrpE are replaced with feedback resistant versions to improve tryptophan production in the genetically engineered bacteria. In some embodiments, trpR and/or the tnaA gene (encoding a tryptophanase converting tryptophan into indole) are deleted to further increase levels of tryptophan produced.

[0464] In any of the described embodiments, any of the gene(s), gene sequence(s) and/or gene circuit(s) or cassette(s) are optionally expressed from an inducible promoter. In certain embodiments, the one or more cassettes are under the control of constitutive promoters. Exemplary inducible promoters which may control the expression of the gene(s), gene sequence(s) and/or gene circuit(s) or cassette(s) include oxygen level-dependent promoters (e.g., FNR-inducible promoter), promoters induced by inflammation or an inflammatory response (RNS, ROS promoters), and promoters induced by a metabolite that may or may not be naturally present (e.g., can be exogenously added) in the gut, e.g., arabinose and tetracycline. The bacteria may also include an auxotrophy, e.g., deletion of thyA (Δ thyA; thymidine dependence).

[0465] In some embodiments, the genetically engineered bacteria further comprise one or more circuits for the production of tryptophan, e.g., as shown in FIG. 40 (A-D) and FIG. 44 and as described elsewhere herein. In some embodiments, AroG and/or TrpE are replaced with feedback resistant versions to improve tryptophan production in the genetically engineered bacteria. In some embodiments, trpR and/or the tnaA gene (encoding a tryptophanase converting tryptophan into indole) are deleted to further increase levels of tryptophan produced.

[0466] In in any of these embodiments the expression of the gene sequences for the production of the indole and other tryptophan metabolites, including, but not limited to, tryptamine and/or indole-3 acetaladehyde, indole-3acetonitrile, indole, indole acetic acid FICZ, indole-3-propionic acid, is under the control of an inducible promoter. Exemplary inducible promoters which may control the expression of the biosynthetic cassettes include oxygen level-dependent promoters (e.g., FNR-inducible promoter), promoters induced by inflammation or an inflammatory response (RNS, ROS promoters), and promoters induced by a metabolite characteristic of a disorder described herein, or that may or may not be naturally present (e.g., can be exogenously added) in the gut, e.g., arabinose and tetracycline. In some embodiments, the gene sequences(s) are controlled by an inducible promoter. In some embodiments, the gene sequences(s) are controlled by a constitutive promoter. In some embodiments, the gene sequences(s) are controlled by an inducible and/or constritutive promoter, and are expressed during bacterial culture in vitro, e.g., for bacterial expansion, production and/or manufacture, as described herein.

[0467] In some embodiments, the genetically engineered bacteria are capable of expressing any one or more of the described circuits in low-oxygen conditions, in the presence of disease or tissue specific molecules or metabolites, in the presence of molecules or metabolites associated with inflammation or an inflammatory response or immune suppression, or in the presence of some other metabolite that may or may not be present in the gut, such as arabinose. In some embodiments, any one or more of the described circuits are present on one or more plasmids (e.g., high copy or low copy) or are integrated into one or more sites in the bacterial chromosome. Also, in some embodiments, the genetically engineered bacteria are further capable of expressing any one or more of the described circuits and further comprise one or more of the following: (1) one or more auxotrophies, such as any auxotrophies known in the art and provided herein, e.g., thyA auxotrophy, (2) one or more kill switch circuits, such as any of the kill-switches described herein or otherwise known in the art, (3) one or more antibiotic resistance circuits, (4) one or more transporters for importing biological molecules or substrates, such any of the transporters described herein or otherwise known in the art, (5) one or more secretion circuits, such as any of the secretion circuits described herein and otherwise known in the art, and (6) combinations of one or more of such additional circuits.

[0468] Tryptamine

[0469] In some embodiments, the genetically engineered bacteria comprise one or more gene sequence(s) which encode one or more tryptophan catabolism enzymes, which produce tryptamine from tryptophan. The monoamine alkaloid, tryptamine, is derived from the direct decarboxylation of tryptophan. Tryptophan is converted to indole-3-acetic acid (IAA) via the enzymes tryptophan monooxygenase (IaaM) and indole-3-acetamide hydrolase (IaaH), which constitute the indole-3-acetamide (IAM) pathway, as described in the figures and examples.

[0470] A non-limiting example of such as strain is shown in FIG. 41A. Another non-limiting example of such as strain is shown in FIG. 43A. In one embodiment, the genetically engineered bacteria comprise one or more gene sequence(s) which encode one or more Tryptophan decarboxylase(s), e.g., from Catharanthus roseus. In one embodiment, the genetically engineered bacteria comprise one or more gene sequence(s) which encode one or more Tryptophan decarboxylase(s), e.g., from Clostridium sporgenenes. In one embodiment, the genetically engineered bacteria comprise one or more gene sequence(s) which encode one or more Tryptophan decarboxylase(s) e.g., from Ruminococcus Gnavus.

[0471] Table 15, Table 11A, and Table 12 lists exemplary sequences for tryptamine production in genetically engineered bacteria.

[0472] In some embodiments, the genetically engineered bacteria which produce tryptamine from tryptophan also optionally comprise one or more gene sequence(s) comprising one or more enzymes for tryptophan production, and gene deletions/or mutations as depicted and described in FIG. 40, FIG. 44A and/or FIG. 44B and described elsewhere herein. In some embodiments, AroG and/or TrpE are replaced with feedback resistant versions to improve tryptophan production in the genetically engineered bacteria. In some embodiments, trpR and/or the tnaA gene (encoding a tryptophanase converting tryptophan into indole) are deleted to further increase levels of tryptophan produced. In some embodiments, the genetically engineered bacteria which produce tryptamine from tryptophan also optionally comprise one or more gene sequence(s) which encode one or more transporter(s) as described herein, through which tryptophan can be imported. Optionally, In some embodiments, the genetically engineered bacteria which produce tryptamine from tryptophan also optionally comprise one or more gene sequence(s) which encode an exporter as described herein, which can export tryptophan or any of its metabolites.

[0473] To improve acetate production, while maintaining high levels of tryptamine production, targeted one or more deletions can be introduced in competing metabolic arms of mixed acid fermentation to prevent the production of alternative metabolic fermentative byproducts (thereby increasing acetate production). Non-limiting examples of competing such competing metabolic arms are frdA (converts phosphoenolpyruvate to succinate), ldhA (converts pyruvate to lactate) and adhE (converts Acetyl-CoA to Ethanol). Deletions which may be introduced therefore include deletion of adhE, ldh, and frd. Thus, in certain embodiments, the genetically engineered bacteria comprise one or more tryptamine production cassette(s) and further comprise mutations and/or deletions in one or more of frdA, ldhA, and adhE.

[0474] In some embodiments, the genetically engineered bacteria comprise one or more tryptamine production cassette(s) described herein and one or more mutation(s) and/or deletion(s) in one or more genes selected from the ldhA gene, the frdA gene and the adhE gene.

[0475] In some embodiments, the genetically engineered bacteria comprise one or more gene sequence(s) encoding one or more enzymes described herein for the production of tryptamine and further comprise a mutation and/or deletion in one or more endogenous genes selected from in the ldhA gene, the frdA gene and the adhE genes. In some embodiments, the genetically engineered bacteria comprise one or more gene sequence(s) encoding one or more enzymes described herein for the production of tryptamine and further comprise a mutation and/or deletion in the endogenous ldhA gene. In some embodiments, the genetically engineered bacteria comprise one or more gene sequence(s) encoding one or more enzymes described herein for the production of tryptamine and further comprise a mutation and/or deletion in the endogenous adhE gene. In some embodiments, the genetically engineered bacteria comprise one or more gene sequence(s) encoding one or more enzymes described herein for the production of tryptamine and further comprise a mutation and/or deletion in the endogenous frdA gene. In some embodiments, the genetically engineered bacteria comprise one or more gene sequence(s) encoding one or more enzymes described herein for the production of tryptamine and further comprise a mutation and/or deletion in the endogenous ldhA and rdA genes. In some embodiments, the genetically engineered bacteria comprise one or more gene sequence(s) encoding one or more enzymes described herein for the production of tryptamine and further comprise a mutation and/or deletion in the endogenous ldhA genes and adhE genes. In some embodiments, the genetically engineered bacteria comprise one or more gene sequence(s) encoding one or more enzymes described herein for the production of tryptamine and further comprise a mutation and/or deletion in the endogenous frdA and adhE genes. In some embodiments, the genetically engineered bacteria comprise one or more gene sequence(s) encoding one or more enzymes described herein for the production of tryptamine and further comprise a mutation and/or deletion in the endogenous ldhA, the frdA, and adhE genes. In some embodiments, the genetically engineered bacteria comprise one or more gene sequence(s) encoding one or more enzymes described herein for the production of tryptamine and further comprise a mutation and/or deletion in one or more endogenous genes selected from in the ldhA gene, the frdA gene and the adhE genes.

[0476] In some embodiments, the genetically engineered bacteria comprise one or more gene sequence(s) selected from trpEfbrDCBA, aroGfbr, tdc, SerAfbr, and ΔtrpR and ΔtnaA, and further comprise a mutation and/or deletion in the endogenous ldhA gene. In some embodiments, the genetically engineered bacteria comprise one or more gene sequence(s) selected from trpEfbrDCBA, aroGfbr, tdc, SerAfbr, and ΔtrpR and ΔtnaA, and further comprise a mutation and/or deletion in the endogenous adhE gene. In some embodiments, the genetically engineered bacteria comprise one or more gene sequence(s) selected from trpEfbrDCBA, aroGfbr, tdc, SerAfbr, and ΔtrpR and ΔtnaA, and further comprise a mutation and/or deletion in the endogenous frdA gene. In some embodiments, the genetically engineered bacteria comprise one or more gene sequence(s) selected from trpEfbrDCBA, aroGfbr, tdc, SerAfbr, and ΔtrpR and ΔtnaA, and further comprise a mutation and/or deletion in the endogenous ldhA and frdA genes. In some embodiments, the genetically engineered bacteria comprise one or more gene sequence(s) selected from trpEfbrDCBA, aroGfbr, tdc, SerAfbr, and ΔtrpR and ΔtnaA, and further comprise a mutation and/or deletion in the endogenous ldhA genes and adhE genes. In some embodiments, the genetically engineered bacteria comprise one or more gene sequence(s) selected from trpEfbrDCBA, aroGfbr, tdc, SerAfbr, and ΔtrpR and ΔtnaA, and further comprise a mutation and/or deletion in the endogenous frdA and adhE genes. In some embodiments, the genetically engineered bacteria comprise one or more gene sequence(s) selected from trpEfbrDCBA, aroGfbr, tdc, SerAfbr, and ΔtrpR and ΔtnaA, and further comprise a mutation and/or deletion in the endogenous ldhA, the frdA, and adhE genes.

[0477] In some embodiments, the genetically engineered bacteria produce 0% to to 2% to 4%, 4% to 6%, 6% to 8%, 8% to 10%, 10% to 12%, 12% to 14%, 14% to 16%, 16% to 18%, 18% to 20%, 20% to 25%, 25% to 30%, 30% to 35%, 35% to 40%, 40% to 45% 45% to 50%, 50% to 55%, 55% to 60%, 60% to 65%, 65% to 70% to 80%, 80% to 90%, or 90% to 100% more acetate than unmodified bacteria of the same bacterial subtype under the same conditions. In yet another embodiment, the genetically engineered bacteria produce 1.0-1.2-fold, 1.2-1.4-fold, 1.4-1.6-fold, 1.6-1.8-fold, 1.8-2-fold, or two-fold more acetate than unmodified bacteria of the same bacterial subtype under the same conditions. In yet another embodiment, the the genetically engineered bacteria produce three-fold, four-fold, five-fold, six-fold, seven-fold, eight-fold, nine-fold, ten-fold, fifteen-fold, twenty-fold, thirty-fold, forty-fold, or fifty-fold, more acetate than unmodified bacteria of the same bacterial subtype under the same conditions.

[0478] In some embodiments, the genetically engineered bacteria produce 0% to 2% to 4%, 4% to 6%, 6% to 8%, 8% to 10%, 10% to 12%, 12% to 14%, 14% to 16%, 16% to 18%, 18% to 20%, 20% to 25%, 25% to 30%, 30% to 35%, 35% to 40%, 40% to 45% 45% to 50%, 50% to 55%, 55% to 60%, 60% to 65%, 65% to 70% to 80%, 80% to 90%, or 90% to 100% more tryptamine than unmodified bacteria of the same bacterial subtype under the same conditions. In yet another embodiment, the genetically engineered bacteria produce 1.0-1.2-fold, 1.2-1.4-fold, 1.4-1.6-fold, 1.6-1.8-fold, 1.8-2-fold, or two-fold more tryptamine than unmodified bacteria of the same bacterial subtype under the same conditions. In yet another embodiment, the the genetically engineered bacteria produce three-fold, four-fold, five-fold, six-fold, seven-fold, eight-fold, nine-fold, ten-fold, fifteen-fold, twenty-fold, thirty-fold, forty-fold, or fifty-fold, more tryptamine than unmodified bacteria of the same bacterial subtype under the same conditions.

[0479] In certain situations, the need may arise to prevent and/or reduce acetate production by of an engineered or naturally occurring strain, e.g., E. coli Nissle, while maintaining high levels of tryptamine production. Without wishing to be bound by theory, one or more mutations and/or deletions in one or more gene(s) encoding in one or more enzymes described herein which function in the acetate producing metabolic arm of fermentation should reduce and/or prevent production of acetate. A non-limiting example of such an enzyme is phosphate acetyltransferase (Pta), which is the first enzyme in the metabolic arm converting acetyl-CoA to acetate. Deletion and/or mutation of the Pta gene or a gene encoding another enzyme in this metabolic arm may also allow for more acetyl-CoA to be used for tryptamine production. Additionally, one or more mutations preventing or reducing the flow through other metabolic arms of mixed acid fermentation, such as those which produce succinate, lactate, and/or ethanol can increase the production of acetyl-CoA, which is available for tryptamine synthesis. Such mutations and/or deletions, include but are not limited to mutations and/or deletions in the frdA, ldhA, and/or adhE genes.

[0480] In some embodiments, the genetically engineered bacteria comprise one or more gene sequence(s) encoding one or more enzymes described herein for the production of tryptamine and further comprise a mutation and/or deletion in the endogenous pta gene. In some embodiments, the genetically engineered bacteria comprise one or more gene sequence(s) encoding one or more enzymes described herein for the production of tryptamine and further comprise a mutation and/or deletion in the endogenous pta gene and in one or more endogenous genes selected from in the ldhA gene, the frdA gene and the adhE gene. In some embodiments, the genetically engineered bacteria comprise one or more gene sequence(s) encoding one or more enzymes described herein for the production of tryptamine and further comprise a mutation in the endogenous pta and adhE genes. In some embodiments, the genetically engineered bacteria comprise one or more gene sequence(s) encoding one or more enzymes described herein for the production of tryptamine and further comprise a mutation in the endogenous pta and ldhA genes. In some embodiments, the genetically engineered bacteria comprise one or more gene sequence(s) encoding one or more enzymes described herein for the production of tryptamine and further comprise a mutation in the endogenous pta and frdA genes. In some embodiments, the genetically engineered bacteria comprise one or more gene sequence(s) encoding one or more enzymes described herein for the production of tryptamine and further comprise a mutation and/or deletion in the endogenous pta, ldhA and frdA genes. In some embodiments, the genetically engineered bacteria comprise one or more gene sequence(s) encoding one or more enzymes described herein for the production of tryptamine and further comprise a mutation in the endogenous pta, ldhA, and adhE genes. In some embodiments, the genetically engineered bacteria comprise one or more gene sequence(s) encoding one or more enzymes described herein for the production of tryptamine and further comprise a mutation in the endogenous pta, frdA and adhE genes. In some embodiments, the genetically engineered bacteria comprise one or more gene sequence(s) encoding one or more enzyme(s) for the production of tryptamine and further comprise a mutation and/or deletion in the endogenous pta, ldhA, frdA, and adhE genes.

[0481] In some embodiments, the genetically engineered bacteria comprise one or more gene sequence(s) selected from trpEfbrDCBA, aroGfbr, tdc, SerAfbr, and ΔtrpR and ΔtnaA, and further comprise a mutation and/or deletion in the endogenous pta gene. In some embodiments, the genetically engineered bacteria comprise one or more gene sequence(s) selected from trpEfbrDCBA, aroGfbr, tdc, SerAfbr, and ΔtrpR and ΔtnaA, and further comprise a mutation and/or deletion in the endogenous pta gene and in one or more endogenous genes selected from in the ldhA gene, the frdA gene and the adhE gene. In some embodiments, the genetically engineered bacteria comprise one or more gene sequence(s) selected from trpEfbrDCBA, aroGfbr, tdc, SerAfbr, and ΔtrpR and ΔtnaA, and further comprise a mutation in the endogenous pta and adhE genes. In some embodiments, the genetically engineered bacteria comprise one or more gene sequence(s) selected from trpEfbrDCBA, aroGfbr, tdc, SerAfbr, and ΔtrpR and ΔtnaA, and further comprise a mutation in the endogenous pta and ldhA genes.

[0482] In some embodiments, the genetically engineered bacteria comprise one or more gene sequence(s) selected from trpEfbrDCBA, aroGfbr, tdc, SerAfbr, and ΔtrpR and ΔtnaA, and further comprise a mutation in the endogenous pta and frdA genes. In some embodiments, the genetically engineered bacteria comprise one or more gene sequence(s) selected from trpEfbrDCBA, aroGfbr, tdc, SerAfbr, and ΔtrpR and ΔtnaA, and further comprise a mutation and/or deletion in the endogenous pta, ldhA and frdA genes. In some embodiments, the genetically engineered bacteria comprise one or more gene sequence(s) selected from trpEfbrDCBA, aroGfbr, tdc, SerAfbr, and ΔtrpR and ΔtnaA, and further comprise a mutation in the endogenous pta, ldhA, and adhE genes. In some embodiments, the genetically engineered bacteria comprise one or more gene sequence(s) selected from trpEfbrDCBA, aroGfbr, tdc, SerAfbr, and ΔtrpR and ΔtnaA, and further comprise a mutation in the endogenous pta, frdA and adhE genes. In some embodiments, the genetically engineered bacteria comprise one or more gene sequence(s) selected from trpEfbrDCBA, aroGfbr, tdc, SerAfbr, and ΔtrpR and ΔtnaA, and further comprise a mutation in the endogenous pta, ldhA, frdA, and adhE genes.

[0483] In some embodiments, the genetically engineered bacteria produce 0% to to 2% to 4%, 4% to 6%, 6% to 8%, 8% to 10%, 10% to 12%, 12% to 14%, 14% to 16%, 16% to 18%, 18% to 20%, 20% to 25%, 25% to 30%, 30% to 35%, 35% to 40%, 40% to 45% 45% to 50%, 50% to 55%, 55% to 60%, 60% to 65%, 65% to 70% to 80%, 80% to 90%, or 90% to 100% less acetate than unmodified bacteria of the same bacterial subtype under the same conditions. In yet another embodiment, the genetically engineered bacteria produce 1.0-1.2-fold, 1.2-1.4-fold, 1.4-1.6-fold, 1.6-1.8-fold, 1.8-2-fold, or two-fold less acetate than unmodified bacteria of the same bacterial subtype under the same conditions. In yet another embodiment, the genetically engineered bacteria produce three-fold, four-fold, five-fold, six-fold, seven-fold, eight-fold, nine-fold, ten-fold, fifteen-fold, twenty-fold, thirty-fold, forty-fold, or fifty-fold, less acetate than unmodified bacteria of the same bacterial subtype under the same conditions.

[0484] In some embodiments, the genetically engineered bacteria produce 0% to to 2% to 4%, 4% to 6%, 6% to 8%, 8% to 10%, 10% to 12%, 12% to 14%, 14% to 16%, 16% to 18%, 18% to 20%, 20% to 25%, 25% to 30%, 30% to 35%, 35% to 40%, 40% to 45% 45% to 50%, 50% to 55%, 55% to 60%, 60% to 65%, 65% to 70% to 80%, 80% to 90%, or 90% to 100% more tryptamine than unmodified bacteria of the same bacterial subtype under the same conditions. In yet another embodiment, the genetically engineered bacteria produce 1.0-1.2-fold, 1.2-1.4-fold, 1.4-1.6-fold, 1.6-1.8-fold, 1.8-2-fold, or two-fold more tryptamine than unmodified bacteria of the same bacterial subtype under the same conditions. In yet another embodiment, the genetically engineered bacteria produce three-fold, four-fold, five-fold, six-fold, seven-fold, eight-fold, nine-fold, ten-fold, fifteen-fold, twenty-fold, thirty-fold, forty-fold, or fifty-fold, more tryptamine than unmodified bacteria of the same bacterial subtype under the same conditions.

[0485] In some embodiments, the genetically engineered bacteria are capable of producing Tryptamine under inducing conditions, e.g., under a condition(s) associated with inflammation. In some embodiments, the genetically engineered bacteria are capable of producing kynurenine in low-oxygen conditions, in the presence of certain molecules or metabolites, in the presence of molecules or metabolites associated with inflammation or an inflammatory response, or in the presence of some other metabolite that may or may not be present in the gut, such as arabinose and others described herein.

[0486] Indole-3-Acetaldehyde and FICZ

[0487] In one embodiment, the genetically engineered bacteria comprise one or more gene sequence(s) which encode one or more tryptophan catabolism enzymes, which produce indole-3-acetaldehyde and FICZ from tryptophan. Exemplary gene cassettes for the production of produce indole-3-acetaldehyde and FICZ from tryptophan are shown in FIG. 41B.

[0488] In one embodiment, the genetically engineered bacteria comprise one or more gene sequence(s) which encode aro9 (L-tryptophan aminotransferase). In one embodiment, the (L-tryptophan aminotransferase is from S. cerevisiae. In one embodiment, the genetically engineered bacteria comprise one or more gene sequence(s) which encode ipdC (Indole-3-pyruvate decarboxylase, e.g., from Enterobacter cloacae). In one embodiment, the genetically engineered bacteria comprise one or more gene sequence(s) which encode aro9 and ipdC. In one embodiment, the genetically engineered bacteria comprise one or more gene sequence(s) which encode aspC (aspartate aminotransferase. In one embodiment, the genetically engineered bacteria comprise one or more gene sequence(s) which encode aspC from E. coli. In one embodiment, the genetically engineered bacteria comprise one or more gene sequence(s) which encode aspC and ipdC. In one embodiment, the genetically engineered bacteria comprise one or more gene sequence(s) which encode taa1 (L-tryptophan-pyruvate aminotransferase, In one embodiment, the genetically engineered bacteria comprise one or more gene sequence(s) which encode taa1 from Arabidopsis thaliana. In one embodiment, the genetically engineered bacteria comprise one or more gene sequence(s) which encode taa1 and ipdC. In one embodiment, the genetically engineered bacteria comprise one or more gene sequence(s) which encode staO (L-tryptophan oxidase). In one embodiment, the genetically engineered bacteria comprise one or more gene sequence(s) which encode staO from Streptomyces sp. TP-A0274. In one embodiment, the genetically engineered bacteria comprise one or more gene sequence(s) which encode staO and ipdC. In one embodiment, the genetically engineered bacteria comprise one or more gene sequence(s) which encode trpDH (Tryptophan dehydrogenase). In one embodiment, the genetically engineered bacteria comprise one or more gene sequence(s) which encode trpDH from Nostoc punctiforme NIES-2108. In one embodiment, the genetically engineered bacteria comprise one or more gene sequence(s) which encode trpDH and ipdC. In one embodiment, the genetically engineered bacteria comprise one or more gene sequence(s) which encode one or more of aro9 or aspC or taa1 or staO or trpDH. In one embodiment, the genetically engineered bacteria comprise one or more gene sequence(s) which encode one or more of aro9 or aspC or taa1 or staO or trpDH and ipdC.

[0489] Further exemplary gene cassettes for the production of produce indole-3-acetaldehyde and FICZ from tryptophan are shown in FIG. 41C. In one embodiment, the genetically engineered bacteria comprise one or more gene sequence(s) which encode tdc (Tryptophan decarboxylase). In one embodiment, the genetically engineered bacteria comprise one or more gene sequence(s) which encode tdc from Catharanthus roseus. In one embodiment, the genetically engineered bacteria comprise one or more gene sequence(s) which encode tynA (Monoamine oxidase). In one embodiment, the genetically engineered bacteria comprise one or more gene sequence(s) which encode tynA from E. coli. In one embodiment, the genetically engineered bacteria comprise one or more gene sequence(s) which encode tdc and tynA.

[0490] In any of these embodiments, the genetically engineered bacteria which produce produce indole-3-acetaldehyde and FICZ also optionally comprise one or more gene sequence(s) comprising one or more enzymes for tryptophan production, and gene deletions/or mutations as depicted and described in FIG. 40, FIG. 44A and/or FIG. 44B and described elsewhere herein. In some embodiments, AroG and/or TrpE are replaced with feedback resistant versions to improve tryptophan production in the genetically engineered bacteria. In some embodiments, trpR and/or the tnaA gene (encoding a tryptophanase converting tryptophan into indole) are deleted to further increase levels of tryptophan produced. In some embodiments, the genetically engineered bacteria which produce indole-3-acetaldehyde and FICZ also optionally comprise one or more gene sequence(s) which encode one or more transporter(s) as described herein, through which tryptophan can be imported. Optionally, in some embodiments, the genetically engineered bacteria which produce indole-3-acetaldehyde and FICZ also optionally comprise one or more gene sequence(s) which encode an exporter as described herein, which can export tryptophan or any of its metabolites.

[0491] To improve acetate production, while maintaining high levels of Indole-3-acetaldehyde and/or FICZ production, targeted one or more deletions can be introduced in competing metabolic arms of mixed acid fermentation to prevent the production of alternative metabolic fermentative byproducts (thereby increasing acetate production). Non-limiting examples of competing such competing metabolic arms are frdA (converts phosphoenolpyruvate to succinate), ldhA (converts pyruvate to lactate) and adhE (converts Acetyl-CoA to Ethanol). Deletions which may be introduced therefore include deletion of adhE, ldh, and frd. Thus, in certain embodiments, the genetically engineered bacteria comprise one or more Indole-3-acetaldehyde and/or FICZ production cassette(s) and further comprise mutations and/or deletions in one or more of frdA, ldhA, and adhE.

[0492] In some embodiments, the genetically engineered bacteria comprise one or more Indole-3-acetaldehyde and/or FICZ production cassette(s) described herein and one or more mutation(s) and/or deletion(s) in one or more genes selected from the ldhA gene, the frdA gene and the adhE gene.

[0493] In some embodiments, the genetically engineered bacteria comprise one or more gene sequence(s) encoding one or more enzymes described herein for the production of Indole-3-acetaldehyde and/or FICZ and further comprise a mutation and/or deletion in one or more endogenous genes selected from in the ldhA gene, the frdA gene and the adhE genes. In some embodiments, the genetically engineered bacteria comprise one or more gene sequence(s) encoding one or more enzymes described herein for the production of Indole-3-acetaldehyde and/or FICZ and further comprise a mutation and/or deletion in the endogenous ldhA gene. In some embodiments, the genetically engineered bacteria comprise one or more gene sequence(s) encoding one or more enzymes described herein for the production of Indole-3-acetaldehyde and/or FICZ and further comprise a mutation and/or deletion in the endogenous adhE gene. In some embodiments, the genetically engineered bacteria comprise one or more gene sequence(s) encoding one or more enzymes described herein for the production of Indole-3-acetaldehyde and/or FICZ and further comprise a mutation and/or deletion in the endogenous frdA gene. In some embodiments, the genetically engineered bacteria comprise one or more gene sequence(s) encoding one or more enzymes described herein for the production of Indole-3-acetaldehyde and/or FICZ and further comprise a mutation and/or deletion in the endogenous ldhA and rdA genes. In some embodiments, the genetically engineered bacteria comprise one or more gene sequence(s) encoding one or more enzymes described herein for the production of Indole-3-acetaldehyde and/or FICZ and further comprise a mutation and/or deletion in the endogenous ldhA genes and adhE genes. In some embodiments, the genetically engineered bacteria comprise one or more gene sequence(s) encoding one or more enzymes described herein for the production of Indole-3-acetaldehyde and/or FICZ and further comprise a mutation and/or deletion in the endogenous frdA and adhE genes. In some embodiments, the genetically engineered bacteria comprise one or more gene sequence(s) encoding one or more enzymes described herein for the production of Indole-3-acetaldehyde and/or FICZ and further comprise a mutation and/or deletion in the endogenous ldhA, the frdA, and adhE genes. In some embodiments, the genetically engineered bacteria comprise one or more gene sequence(s) encoding one or more enzymes described herein for the production of Indole-3-acetaldehyde and/or FICZ and further comprise a mutation and/or deletion in one or more endogenous genes selected from in the ldhA gene, the frdA gene and the adhE genes.

[0494] In some embodiments, the genetically engineered bacteria produce 0% to to 2% to 4%, 4% to 6%, 6% to 8%, 8% to 10%, 10% to 12%, 12% to 14%, 14% to 16%, 16% to 18%, 18% to 20%, 20% to 25%, 25% to 30%, 30% to 35%, 35% to 40%, 40% to 45% 45% to 50%, 50% to 55%, 55% to 60%, 60% to 65%, 65% to 70% to 80%, 80% to 90%, or 90% to 100% more acetate than unmodified bacteria of the same bacterial subtype under the same conditions. In yet another embodiment, the genetically engineered bacteria produce 1.0-1.2-fold, 1.2-1.4-fold, 1.4-1.6-fold, 1.6-1.8-fold, 1.8-2-fold, or two-fold more acetate than unmodified bacteria of the same bacterial subtype under the same conditions. In yet another embodiment, the the genetically engineered bacteria produce three-fold, four-fold, five-fold, six-fold, seven-fold, eight-fold, nine-fold, ten-fold, fifteen-fold, twenty-fold, thirty-fold, forty-fold, or fifty-fold, more acetate than unmodified bacteria of the same bacterial subtype under the same conditions.

[0495] In some embodiments, the genetically engineered bacteria produce 0% to 2% to 4%, 4% to 6%, 6% to 8%, 8% to 10%, 10% to 12%, 12% to 14%, 14% to 16%, 16% to 18%, 18% to 20%, 20% to 25%, 25% to 30%, 30% to 35%, 35% to 40%, 40% to 45% 45% to 50%, 50% to 55%, 55% to 60%, 60% to 65%, 65% to 70% to 80%, 80% to 90%, or 90% to 100% more Indole-3-acetaldehyde and/or FICZ than unmodified bacteria of the same bacterial subtype under the same conditions. In yet another embodiment, the genetically engineered bacteria produce 1.0-1.2-fold, 1.2-1.4-fold, 1.4-1.6-fold, 1.6-1.8-fold, 1.8-2-fold, or two-fold more Indole-3-acetaldehyde and/or FICZ than unmodified bacteria of the same bacterial subtype under the same conditions. In yet another embodiment, the the genetically engineered bacteria produce three-fold, four-fold, five-fold, six-fold, seven-fold, eight-fold, nine-fold, ten-fold, fifteen-fold, twenty-fold, thirty-fold, forty-fold, or fifty-fold, more Indole-3-acetaldehyde and/or FICZ than unmodified bacteria of the same bacterial subtype under the same conditions.

[0496] In certain situations, the need may arise to prevent and/or reduce acetate production by of an engineered or naturally occurring strain, e.g., E. coli Nissle, while maintaining high levels of Indole-3-acetaldehyde and/or FICZ production. Without wishing to be bound by theory, one or more mutations and/or deletions in one or more gene(s) encoding in one or more enzymes described herein which function in the acetate producing metabolic arm of fermentation should reduce and/or prevent production of acetate. A non-limiting example of such an enzyme is phosphate acetyltransferase (Pta), which is the first enzyme in the metabolic arm converting acetyl-CoA to acetate. Deletion and/or mutation of the Pta gene or a gene encoding another enzyme in this metabolic arm may also allow for more acetyl-CoA to be used for Indole-3-acetaldehyde and/or FICZ production. Additionally, one or more mutations preventing or reducing the flow through other metabolic arms of mixed acid fermentation, such as those which produce succinate, lactate, and/or ethanol can increase the production of acetyl-CoA, which is available for Indole-3-acetaldehyde and/or FICZ synthesis. Such mutations and/or deletions, include but are not limited to mutations and/or deletions in the frdA, ldhA, and/or adhE genes.

[0497] In some embodiments, the genetically engineered bacteria comprise one or more gene sequence(s) encoding one or more enzymes described herein for the production of Indole-3-acetaldehyde and/or FICZ and further comprise a mutation and/or deletion in the endogenous pta gene. In some embodiments, the genetically engineered bacteria comprise one or more gene sequence(s) encoding one or more enzymes described herein for the production of Indole-3-acetaldehyde and/or FICZ and further comprise a mutation and/or deletion in the endogenous pta gene and in one or more endogenous genes selected from in the ldhA gene, the frdA gene and the adhE gene. In some embodiments, the genetically engineered bacteria comprise one or more gene sequence(s) encoding one or more enzymes described herein for the production of Indole-3-acetaldehyde and/or FICZ and further comprise a mutation in the endogenous pta and adhE genes. In some embodiments, the genetically engineered bacteria comprise one or more gene sequence(s) encoding one or more enzymes described herein for the production of Indole-3-acetaldehyde and/or FICZ and further comprise a mutation in the endogenous pta and ldhA genes. In some embodiments, the genetically engineered bacteria comprise one or more gene sequence(s) encoding one or more enzymes described herein for the production of Indole-3-acetaldehyde and/or FICZ and further comprise a mutation in the endogenous pta and frdA genes. In some embodiments, the genetically engineered bacteria comprise one or more gene sequence(s) encoding one or more enzymes described herein for the production of Indole-3-acetaldehyde and/or FICZ and further comprise a mutation and/or deletion in the endogenous pta, ldhA and frdA genes. In some embodiments, the genetically engineered bacteria comprise one or more gene sequence(s) encoding one or more enzymes described herein for the production of Indole-3-acetaldehyde and/or FICZ and further comprise a mutation in the endogenous pta, ldhA, and adhE genes. In some embodiments, the genetically engineered bacteria comprise one or more gene sequence(s) encoding one or more enzymes described herein for the production of Indole-3-acetaldehyde and/or FICZ and further comprise a mutation in the endogenous pta, frdA and adhE genes. In some embodiments, the genetically engineered bacteria comprise one or more gene sequence(s) encoding one or more enzyme(s) for the production of Indole-3-acetaldehyde and/or FICZ and further comprise a mutation and/or deletion in the endogenous pta, ldhA, frdA, and adhE genes.

[0498] In some embodiments, the genetically engineered bacteria produce 0% to to 2% to 4%, 4% to 6%, 6% to 8%, 8% to 10%, 10% to 12%, 12% to 14%, 14% to 16%, 16% to 18%, 18% to 20%, 20% to 25%, 25% to 30%, 30% to 35%, 35% to 40%, 40% to 45% 45% to 50%, 50% to 55%, 55% to 60%, 60% to 65%, 65% to 70% to 80%, 80% to 90%, or 90% to 100% less acetate than unmodified bacteria of the same bacterial subtype under the same conditions. In yet another embodiment, the genetically engineered bacteria produce 1.0-1.2-fold, 1.2-1.4-fold, 1.4-1.6-fold, 1.6-1.8-fold, 1.8-2-fold, or two-fold less acetate than unmodified bacteria of the same bacterial subtype under the same conditions. In yet another embodiment, the genetically engineered bacteria produce three-fold, four-fold, five-fold, six-fold, seven-fold, eight-fold, nine-fold, ten-fold, fifteen-fold, twenty-fold, thirty-fold, forty-fold, or fifty-fold, less acetate than unmodified bacteria of the same bacterial subtype under the same conditions.

[0499] In some embodiments, the genetically engineered bacteria produce 0% to to 2% to 4%, 4% to 6%, 6% to 8%, 8% to 10%, 10% to 12%, 12% to 14%, 14% to 16%, 16% to 18%, 18% to 20%, 20% to 25%, 25% to 30%, 30% to 35%, 35% to 40%, 40% to 45% 45% to 50%, 50% to 55%, 55% to 60%, 60% to 65%, 65% to 70% to 80%, 80% to 90%, or 90% to 100% more Indole-3-acetaldehyde and/or FICZ than unmodified bacteria of the same bacterial subtype under the same conditions. In yet another embodiment, the genetically engineered bacteria produce 1.0-1.2-fold, 1.2-1.4-fold, 1.4-1.6-fold, 1.6-1.8-fold, 1.8-2-fold, or two-fold more Indole-3-acetaldehyde and/or FICZ than unmodified bacteria of the same bacterial subtype under the same conditions. In yet another embodiment, the genetically engineered bacteria produce three-fold, four-fold, five-fold, six-fold, seven-fold, eight-fold, nine-fold, ten-fold, fifteen-fold, twenty-fold, thirty-fold, forty-fold, or fifty-fold, more Indole-3-acetaldehyde and/or FICZ than unmodified bacteria of the same bacterial subtype under the same conditions.

[0500] In some embodiments, the genetically engineered bacteria are capable of producing Indole-3-aldehyde under inducing conditions, e.g., under a condition(s) associated with inflammation. In some embodiments, the genetically engineered bacteria are capable of producing kynurenine in low-oxygen conditions, in the presence of certain molecules or metabolites, in the presence of molecules or metabolites associated with inflammation or an inflammatory response, or in the presence of some other metabolite that may or may not be present in the gut, such as arabinose.

[0501] In some embodiments, the gene sequences(s) are controlled by an inducible promoter. In some embodiments, the gene sequences(s) are controlled by a constitutive promoter. In some embodiments, the gene sequences(s) are controlled by an inducible and/or constritutive promoter, and are expressed during bacterial culture in vitro, e.g., for bacterial expansion, production and/or manufacture, as described herein.

[0502] Indole-3-Acetic Acid

[0503] In some embodiments, the genetically engineered bacteria comprise one or more gene cassettes which convert tryptophan to Indole-3-aldehyde and Indole Acetic Acid, e.g., via a tryptophan aminotransferase cassette. A non-limiting example of such a tryptophan aminotransferase expressed by the genetically engineered bacteria is in the tables. In some embodiments, the genetically engineered bacteria take up tryptophan through an endogenous or exogenous transporter, and further produce Indole-3-aldehyde and Indole Acetic Acid from tryptophan. In some embodiments, the genetically engineered bacteria optionally comprise a tryptophan and/or indole metabolite exporter.

[0504] The genetically engineered bacteria may comprise any suitable gene for producing Indole-3-aldehyde and/or Indole Acetic Acid and/or Tryptamine. In some embodiments, the gene for producing kynurenine is modified and/or mutated, e.g., to enhance stability, increase Indole-3-aldehyde and/or Indole Acetic Acid and/or Tryptamine production, and/or increase anti-inflammatory potency under inducing conditions. In some embodiments, the engineered bacteria also have enhanced uptake or import of tryptophan, e.g., comprise a transporter or other mechanism for increasing the uptake of tryptophan into the bacterial cell, as discussed in detail above. In some embodiments, the engineered bacteria also have enhanced export of a indole tryptophan metabolite, e.g., comprise an exporter or other mechanism for increasing the uptake of tryptophan into the bacterial cell, as discussed in detail above. In some embodiments, the genetically engineered bacteria are capable of producing Indole-3-aldehyde and/or Indole Acetic Acid and/or Tryptamine under inducing conditions, e.g., under a condition(s) associated with inflammation. In some embodiments, the genetically engineered bacteria are capable of producing kynurenine in low-oxygen conditions, in the presence of certain molecules or metabolites, in the presence of molecules or metabolites associated with inflammation or an inflammatory response, or in the presence of some other metabolite that may or may not be present in the gut, such as arabinose.

[0505] In one embodiment, the genetically engineered bacteria comprise one or more gene sequence(s) which encode one or more tryptophan catabolism enzymes, which produce indole-3-acetic acid.

[0506] Non-limiting example of such gene sequence(s) are shown in FIG. 42A, FIG. 42B, FIG. 42C, FIG. 42D, and FIG. 42E, and FIG. 43B and FIG. 43E.

[0507] In one embodiment, the genetically engineered bacteria comprise one or more gene sequence(s) which encode aro9 (L-tryptophan aminotransferase). In one embodiment, the genetically engineered bacteria comprise one or more gene sequence(s) which encode aro9 from S. cerevisae). In one embodiment, the genetically engineered bacteria comprise one or more gene sequence(s) which encode aspC (aspartate aminotransferase), In one embodiment, the genetically engineered bacteria comprise one or more gene sequence(s) which encode aspC from E. coli. In one embodiment, the genetically engineered bacteria comprise one or more gene sequence(s) which encode taa1 (L-tryptophan-pyruvate aminotransferase. In one embodiment, the genetically engineered bacteria comprise one or more gene sequence(s) which encode taa1 from Arabidopsis thaliana). In one embodiment, the genetically engineered bacteria comprise one or more gene sequence(s) which encode staO (L-tryptophan oxidase). In one embodiment, the genetically engineered bacteria comprise one or more gene sequence(s) which encode staO from Streptomyces sp. TP-A0274). In one embodiment, the genetically engineered bacteria comprise one or more gene sequence(s) which encode trpDH (Tryptophan dehydrogenase). In one embodiment, the genetically engineered bacteria comprise one or more gene sequence(s) which encode trpDH from Nostoc punctiforme NIES-2108). In one embodiment, the genetically engineered bacteria comprise one or more gene sequence(s) which encode iad1 (Indole-3-acetaldehyde dehydrogenase). In one embodiment, the genetically engineered bacteria comprise one or more gene sequence(s) which encode iad1 from Ustilago maydis. In one embodiment, the genetically engineered bacteria comprise one or more gene sequence(s) which encode AAO1 (Indole-3-acetaldehyde oxidase). In one embodiment, the genetically engineered bacteria comprise one or more gene sequence(s) which encode AAO1 from Arabidopsis thaliana. In one embodiment, the genetically engineered bacteria comprise one or more gene sequence(s) which encode ipdC (Indole-3-pyruvate decarboxylase, e.g., from Enterobacter cloacae). In one embodiment, the genetically engineered bacteria comprise one or more gene sequence(s) which encode ipdC (Indole-3-pyruvate decarboxylase, e.g., from Enterobacter cloacae) in combination with one or more sequences encoding enzymes selected from aro9 and/or aspC and/or taa1 and/or staO and/or trpDH. In one embodiment, the genetically engineered bacteria comprise one or more gene sequence(s) which encode ipdC (Indole-3-pyruvate decarboxylase, e.g., from Enterobacter cloacae) in combination with one or more sequences encoding enzymes selected from iad1 and/or aao1. In one embodiment, the genetically engineered bacteria comprise one or more gene sequence(s) which encode ipdC (Indole-3-pyruvate decarboxylase, e.g., from Enterobacter cloacae) in combination with one or more sequences encoding enzymes selected from aro9 and/or aspC and/or taa1 and/or staO and in combination with one or more sequences encoding enzymes selected from iad1 and/or aao1 (see, e.g., FIG. 42A).

[0508] Another non-limiting example of gene sequence(s) for the production of indole-3-acetic acid are shown in FIG. 42B. In one embodiment, the genetically engineered bacteria comprise one or more gene sequence(s) which encode tdc (Tryptophan decarboxylase). In one embodiment, the genetically engineered bacteria comprise one or more gene sequence(s) which encode tdc from Catharanthus roseus). In one embodiment, the genetically engineered bacteria comprise one or more gene sequence(s) which encode tynA (Monoamine oxidase). In one embodiment, the genetically engineered bacteria comprise one or more gene sequence(s) which encode tynA from E. coli). In one embodiment, the genetically engineered bacteria comprise one or more gene sequence(s) which encode iad1 (Indole-3-acetaldehyde dehydrogenase). In one embodiment, the genetically engineered bacteria comprise one or more gene sequence(s) which encode iad1 from Ustilago maydis). In one embodiment, the genetically engineered bacteria comprise one or more gene sequence(s) which encode AAO1 (Indole-3-acetaldehyde oxidase). In one embodiment, the genetically engineered bacteria comprise one or more gene sequence(s) which encode AAO1 from Arabidopsis thaliana). In one embodiment, the genetically engineered bacteria comprise one or more gene sequence(s) which encode tdc and tynA. In one embodiment, the genetically engineered bacteria comprise one or more gene sequence(s) which encode tdc and one or more sequence(s) selected from iad1 and/or aao1. In one embodiment, the genetically engineered bacteria comprise one or more gene sequence(s) which encode tynA and one or more sequence(s) selected from iad1 and/or aao1. In one embodiment, the genetically engineered bacteria comprise one or more gene sequence(s) which encode tdc and tynA and one or more sequence(s) selected from iad1 and/or aao1.

[0509] Another non-limiting example of gene sequence(s) for the production of indole-3-acetic acid are shown in FIG. 42C. In one embodiment, the genetically engineered bacteria comprise one or more gene sequence(s) which encode yuc2 (indole-3-pyruvate monooxygenase). In one embodiment, the genetically engineered bacteria comprise one or more gene sequence(s) which encode yuc2 from Enterobacter cloacae. In one embodiment, the genetically engineered bacteria comprise one or more gene sequence(s) which encode aro9 (L-tryptophan aminotransferase). In one embodiment, the (L-tryptophan aminotransferase is from S. cerevisiae. In one embodiment, the genetically engineered bacteria comprise one or more gene sequence(s) which encode aro9 and yuc2. In one embodiment, the genetically engineered bacteria comprise one or more gene sequence(s) which encode aspC (aspartate aminotransferase. In one embodiment, the genetically engineered bacteria comprise one or more gene sequence(s) which encode aspC from E. coli. In one embodiment, the genetically engineered bacteria comprise one or more gene sequence(s) which encode aspC and yuc2. In one embodiment, the genetically engineered bacteria comprise one or more gene sequence(s) which encode taa1 (L-tryptophan-pyruvate aminotransferase, In one embodiment, the genetically engineered bacteria comprise one or more gene sequence(s) which encode taa1 from Arabidopsis thaliana. In one embodiment, the genetically engineered bacteria comprise one or more gene sequence(s) which encode taa1 and yuc2. In one embodiment, the genetically engineered bacteria comprise one or more gene sequence(s) which encode staO (L-tryptophan oxidase). In one embodiment, the genetically engineered bacteria comprise one or more gene sequence(s) which encode staO from Streptomyces sp. TP-A0274. In one embodiment, the genetically engineered bacteria comprise one or more gene sequence(s) which encode staO and yuc2. In one embodiment, the genetically engineered bacteria comprise one or more gene sequence(s) which encode trpDH (Tryptophan dehydrogenase). In one embodiment, the genetically engineered bacteria comprise one or more gene sequence(s) which encode trpDH from Nostoc punctiforme NIES-2108. In one embodiment, the genetically engineered bacteria comprise one or more gene sequence(s) which encode trpDH and yuc2. In one embodiment, the genetically engineered bacteria comprise one or more gene sequence(s) which encode one or more of aro9 or aspC or taa1 or staO or trpDH. In one embodiment, the genetically engineered bacteria comprise one or more gene sequence(s) which encode one or more of aro9 or aspC or taa1 or staO or trpDH and yuc2.

[0510] Another non-limiting example of gene sequence(s) for the production of acetic acid are shown in FIG. 42D. In one embodiment, the genetically engineered bacteria comprise one or more gene sequence(s) which encode IaaM (Tryptophan 2-monooxygenase). In one embodiment, the genetically engineered bacteria comprise one or more gene sequence(s) which encode IaaM from Pseudomonas savastanoi). In one embodiment, the genetically engineered bacteria comprise one or more gene sequence(s) which encode iaaH (Indoleacetamide hydrolase). In one embodiment, the genetically engineered bacteria comprise one or more gene sequence(s) which encode iaaH from Pseudomonas savastanoi). In one embodiment, the genetically engineered bacteria comprise one or more gene sequence(s) which encode IaaM and iaaH.

[0511] Another non-limiting example of gene sequence(s) for the production of acetic acid are shown in FIG. 42E. In one embodiment, the genetically engineered bacteria comprise one or more gene sequence(s) which encode cyp71a13 (indoleacetaldoxime dehydratase). In one embodiment, the genetically engineered bacteria comprise one or more gene sequence(s) which encode cyp71a13 from Arabidopsis thaliana. In one embodiment, the genetically engineered bacteria comprise one or more gene sequence(s) which encode nit1 (Nitrilase). In one embodiment, the genetically engineered bacteria comprise one or more gene sequence(s) which encode nit1 from Arabidopsis thaliana. In one embodiment, the genetically engineered bacteria comprise one or more gene sequence(s) which encode iaaH (Indoleacetamide hydrolase). In one embodiment, the genetically engineered bacteria comprise one or more gene sequence(s) which encode iaaH from Pseudomonas savastanoi). In one embodiment, the genetically engineered bacteria comprise one or more gene sequence(s) which encode cyp79B2 (tryptophan N-monooxygenase). In one embodiment, the genetically engineered bacteria comprise one or more gene sequence(s) which encode cyp79B2 from Arabidopsis thaliana. In one embodiment, the genetically engineered bacteria comprise one or more gene sequence(s) which encode cyp79B2 and cyp71a13. In one embodiment, the genetically engineered bacteria comprise one or more gene sequence(s) which encode cyp79B2 from Arabidopsis thaliana. In one embodiment, the genetically engineered bacteria comprise one or more gene sequence(s) which encode cyp79B2 and nit1 and/or iaaH. In one embodiment, the genetically engineered bacteria comprise one or more gene sequence(s) which encode cyp79B3 (tryptophan N-monooxygenase). In one embodiment, the genetically engineered bacteria comprise one or more gene sequence(s) which encode cyp79B3 from Arabidopsis thaliana. In one embodiment, the genetically engineered bacteria comprise one or more gene sequence(s) which encode cyp79B3 and cyp71a13. In one embodiment, the genetically engineered bacteria comprise one or more gene sequence(s) which encode cyp79B3 and cyp71a13 and nit1 and/or iaaH. In one embodiment, the genetically engineered bacteria comprise one or more gene sequence(s) which encode cyp79B3, cyp79B2 and cyp71a13. In one embodiment, the genetically engineered bacteria comprise one or more gene sequence(s) which encode cyp79B3, cyp79B2 and cyp71a13, and nit1 and/or iaaH. In one embodiment, the genetically engineered bacteria comprise one or more gene sequence(s) which encode cyp79B3 from Arabidopsis thaliana. In one embodiment, the genetically engineered bacteria comprise one or more gene sequence(s) which encode cyp79B3 and cyp71a13 and nit1 and iaaH. In one embodiment, the genetically engineered bacteria comprise one or more gene sequence(s) which encode cyp79B3, cyp79B2 and cyp71a13 and nit1 and iaaH.

[0512] Another non-limiting example of gene sequence(s) for the production of indole-3-acetic acid are shown in FIG. 42F. Another non-limiting example of gene sequence(s) for the production of indole-3-acetic acid are shown in FIG. 343E. In one embodiment, the genetically engineered bacteria comprise one or more gene sequence(s) which encode trpDH (Tryptophan dehydrogenase). In one embodiment, the genetically engineered bacteria comprise one or more gene sequence(s) which encode trpDH from Nostoc punctiforme NIES-2108. In one embodiment, the genetically engineered bacteria comprise one or more gene sequence(s) which encode ipdC (Indole-3-pyruvate decarboxylase, e.g., from Enterobacter cloacae). In one embodiment, the genetically engineered bacteria comprise one or more gene sequence(s) which encode iad1 (Indole-3-acetaldehyde dehydrogenase). In one embodiment, the genetically engineered bacteria comprise one or more gene sequence(s) which encode iad1 from Ustilago maydis. In one embodiment, the genetically engineered bacteria comprise one or more gene sequence(s) which encode one or more of trpDH and/or ipdC and/or iad1. In one embodiment, the genetically engineered bacteria comprise one or more gene sequence(s) which encode one or more of trpDH and ipdC and iad1.

[0513] In any of these embodiments, the genetically engineered bacteria which produce indole acetic acid also optionally comprise one or more gene sequence(s) comprising one or more enzymes for tryptophan production, and gene deletions/or mutations as depicted and described in FIG. 40, FIG. 44A and/or FIG. 44B and described elsewhere herein. In some embodiments, AroG and/or TrpE are replaced with feedback resistant versions to improve tryptophan production in the genetically engineered bacteria. In some embodiments, trpR and/or the tnaA gene (encoding a tryptophanase converting tryptophan into indole) are deleted to further increase levels of tryptophan produced. In some embodiments, the genetically engineered bacteria which produce indole acetic acid also optionally comprise one or more gene sequence(s) which encode one or more transporter(s) as described herein, through which tryptophan can be imported. Optionally, in some embodiments, the genetically engineered bacteria which produce indole acetic acid also optionally comprise one or more gene sequence(s) which encode an exporter as described herein, which can export tryptophan or any of its metabolites.

[0514] To improve acetate production, while maintaining high levels of indole-3-acetic acid production, targeted one or more deletions can be introduced in competing metabolic arms of mixed acid fermentation to prevent the production of alternative metabolic fermentative byproducts (thereby increasing acetate production). Non-limiting examples of competing such competing metabolic arms are frdA (converts phosphoenolpyruvate to succinate), ldhA (converts pyruvate to lactate) and adhE (converts Acetyl-CoA to Ethanol). Deletions which may be introduced therefore include deletion of adhE, ldh, and frd. Thus, in certain embodiments, the genetically engineered bacteria comprise one or more indole-3-acetic acid production cassette(s) and further comprise mutations and/or deletions in one or more of frdA, ldhA, and adhE.

[0515] In some embodiments, the genetically engineered bacteria comprise one or more indole-3-acetic acid production cassette(s) described herein and one or more mutation(s) and/or deletion(s) in one or more genes selected from the ldhA gene, the frdA gene and the adhE gene.

[0516] In some embodiments, the genetically engineered bacteria comprise one or more gene sequence(s) encoding one or more enzymes described herein for the production of indole-3-acetic acid and further comprise a mutation and/or deletion in one or more endogenous genes selected from in the ldhA gene, the frdA gene and the adhE genes. In some embodiments, the genetically engineered bacteria comprise one or more gene sequence(s) encoding one or more enzymes described herein for the production of indole-3-acetic acid and further comprise a mutation and/or deletion in the endogenous ldhA gene. In some embodiments, the genetically engineered bacteria comprise one or more gene sequence(s) encoding one or more enzymes described herein for the production of indole-3-acetic acid and further comprise a mutation and/or deletion in the endogenous adhE gene. In some embodiments, the genetically engineered bacteria comprise one or more gene sequence(s) encoding one or more enzymes described herein for the production of indole-3-acetic acid and further comprise a mutation and/or deletion in the endogenous frdA gene. In some embodiments, the genetically engineered bacteria comprise one or more gene sequence(s) encoding one or more enzymes described herein for the production of indole-3-acetic acid and further comprise a mutation and/or deletion in the endogenous ldhA and rdA genes. In some embodiments, the genetically engineered bacteria comprise one or more gene sequence(s) encoding one or more enzymes described herein for the production of indole-3-acetic acid and further comprise a mutation and/or deletion in the endogenous ldhA genes and adhE genes. In some embodiments, the genetically engineered bacteria comprise one or more gene sequence(s) encoding one or more enzymes described herein for the production of indole-3-acetic acid and further comprise a mutation and/or deletion in the endogenous frdA and adhE genes. In some embodiments, the genetically engineered bacteria comprise one or more gene sequence(s) encoding one or more enzymes described herein for the production of indole-3-acetic acid and further comprise a mutation and/or deletion in the endogenous ldhA, the frdA, and adhE genes. In some embodiments, the genetically engineered bacteria comprise one or more gene sequence(s) encoding one or more enzymes described herein for the production of indole-3-acetic acid and further comprise a mutation and/or deletion in one or more endogenous genes selected from in the ldhA gene, the frdA gene and the adhE genes.

[0517] In some embodiments, the genetically engineered bacteria comprise one or more gene sequence(s) selected from trpEfbrDCBA, aroGfbr, SerAfbr, trpDH, ipdC, iad, and ΔtrpR, ΔtnaA, and further comprise a mutation and/or deletion in the endogenous ldhA gene. In some embodiments, the genetically engineered bacteria comprise one or more gene sequence(s) selected from trpEfbrDCBA, aroGfbr, SerAfbr, trpDH, ipdC, iad, and ΔtrpR, ΔtnaA, and further comprise a mutation and/or deletion in the endogenous adhE gene. In some embodiments, the genetically engineered bacteria comprise one or more gene sequence(s) selected from trpEfbrDCBA, aroGfbr, SerAfbr, trpDH, ipdC, iad, and ΔtrpR, ΔtnaA, and further comprise a mutation and/or deletion in the endogenous frdA gene. In some embodiments, the genetically engineered bacteria comprise one or more gene sequence(s) selected from trpEfbrDCBA, aroGfbr, SerAfbr, trpDH, ipdC, iad, and ΔtrpR, ΔtnaA, and further comprise a mutation and/or deletion in the endogenous ldhA and frdA genes. In some embodiments, the genetically engineered bacteria comprise one or more gene sequence(s) selected from trpEfbrDCBA, aroGfbr, SerAfbr, trpDH, ipdC, iad, and ΔtrpR, ΔtnaA, and further comprise a mutation and/or deletion in the endogenous ldhA genes and adhE genes. In some embodiments, the genetically engineered bacteria comprise one or more gene sequence(s) selected from trpEfbrDCBA, aroGfbr, SerAfbr, trpDH, ipdC, iad, and ΔtrpR, ΔtnaA, and further comprise a mutation and/or deletion in the endogenous frdA and adhE genes. In some embodiments, the genetically engineered bacteria comprise one or more gene sequence(s) selected from trpEfbrDCBA, aroGfbr, SerAfbr, trpDH, ipdC, iad, and ΔtrpR, ΔtnaA, and further comprise a mutation and/or deletion in the endogenous ldhA, the frdA, and adhE genes.

[0518] In some embodiments, the genetically engineered bacteria produce 0% to to 2% to 4%, 4% to 6%, 6% to 8%, 8% to 10%, 10% to 12%, 12% to 14%, 14% to 16%, 16% to 18%, 18% to 20%, 20% to 25%, 25% to 30%, 30% to 35%, 35% to 40%, 40% to 45% 45% to 50%, 50% to 55%, 55% to 60%, 60% to 65%, 65% to 70% to 80%, 80% to 90%, or 90% to 100% more acetate than unmodified bacteria of the same bacterial subtype under the same conditions. In yet another embodiment, the genetically engineered bacteria produce 1.0-1.2-fold, 1.2-1.4-fold, 1.4-1.6-fold, 1.6-1.8-fold, 1.8-2-fold, or two-fold more acetate than unmodified bacteria of the same bacterial subtype under the same conditions. In yet another embodiment, the the genetically engineered bacteria produce three-fold, four-fold, five-fold, six-fold, seven-fold, eight-fold, nine-fold, ten-fold, fifteen-fold, twenty-fold, thirty-fold, forty-fold, or fifty-fold, more acetate than unmodified bacteria of the same bacterial subtype under the same conditions.

[0519] In some embodiments, the genetically engineered bacteria produce 0% to 2% to 4%, 4% to 6%, 6% to 8%, 8% to 10%, 10% to 12%, 12% to 14%, 14% to 16%, 16% to 18%, 18% to 20%, 20% to 25%, 25% to 30%, 30% to 35%, 35% to 40%, 40% to 45% 45% to 50%, 50% to 55%, 55% to 60%, 60% to 65%, 65% to 70% to 80%, 80% to 90%, or 90% to 100% more indole-3-acetic acid than unmodified bacteria of the same bacterial subtype under the same conditions. In yet another embodiment, the genetically engineered bacteria produce 1.0-1.2-fold, 1.2-1.4-fold, 1.4-1.6-fold, 1.6-1.8-fold, 1.8-2-fold, or two-fold more indole-3-acetic acid than unmodified bacteria of the same bacterial subtype under the same conditions. In yet another embodiment, the the genetically engineered bacteria produce three-fold, four-fold, five-fold, six-fold, seven-fold, eight-fold, nine-fold, ten-fold, fifteen-fold, twenty-fold, thirty-fold, forty-fold, or fifty-fold, more indole-3-acetic acid than unmodified bacteria of the same bacterial subtype under the same conditions.

[0520] In certain situations, the need may arise to prevent and/or reduce acetate production by of an engineered or naturally occurring strain, e.g., E. coli Nissle, while maintaining high levels of indole-3-acetic acid production. Without wishing to be bound by theory, one or more mutations and/or deletions in one or more gene(s) encoding in one or more enzymes described herein which function in the acetate producing metabolic arm of fermentation should reduce and/or prevent production of acetate. A non-limiting example of such an enzyme is phosphate acetyltransferase (Pta), which is the first enzyme in the metabolic arm converting acetyl-CoA to acetate. Deletion and/or mutation of the Pta gene or a gene encoding another enzyme in this metabolic arm may also allow for more acetyl-CoA to be used for indole-3-acetic acid production. Additionally, one or more mutations preventing or reducing the flow through other metabolic arms of mixed acid fermentation, such as those which produce succinate, lactate, and/or ethanol can increase the production of acetyl-CoA, which is available for indole-3-acetic acid synthesis. Such mutations and/or deletions, include but are not limited to mutations and/or deletions in the frdA, ldhA, and/or adhE genes.

[0521] In some embodiments, the genetically engineered bacteria comprise one or more gene sequence(s) encoding one or more enzymes described herein for the production of indole-3-acetic acid and further comprise a mutation and/or deletion in the endogenous pta gene. In some embodiments, the genetically engineered bacteria comprise one or more gene sequence(s) encoding one or more enzymes described herein for the production of indole-3-acetic acid and further comprise a mutation and/or deletion in the endogenous pta gene and in one or more endogenous genes selected from in the ldhA gene, the frdA gene and the adhE gene. In some embodiments, the genetically engineered bacteria comprise one or more gene sequence(s) encoding one or more enzymes described herein for the production of indole-3-acetic acid and further comprise a mutation in the endogenous pta and adhE genes. In some embodiments, the genetically engineered bacteria comprise one or more gene sequence(s) encoding one or more enzymes described herein for the production of indole-3-acetic acid and further comprise a mutation in the endogenous pta and ldhA genes. In some embodiments, the genetically engineered bacteria comprise one or more gene sequence(s) encoding one or more enzymes described herein for the production of indole-3-acetic acid and further comprise a mutation in the endogenous pta and frdA genes. In some embodiments, the genetically engineered bacteria comprise one or more gene sequence(s) encoding one or more enzymes described herein for the production of indole-3-acetic acid and further comprise a mutation and/or deletion in the endogenous pta, ldhA and frdA genes. In some embodiments, the genetically engineered bacteria comprise one or more gene sequence(s) encoding one or more enzymes described herein for the production of indole-3-acetic acid and further comprise a mutation in the endogenous pta, ldhA, and adhE genes. In some embodiments, the genetically engineered bacteria comprise one or more gene sequence(s) encoding one or more enzymes described herein for the production of indole-3-acetic acid and further comprise a mutation in the endogenous pta, frdA and adhE genes. In some embodiments, the genetically engineered bacteria comprise one or more gene sequence(s) encoding one or more enzyme(s) for the production of indole-3-acetic acid and further comprise a mutation and/or deletion in the endogenous pta, ldhA, frdA, and adhE genes.

[0522] In some embodiments, the genetically engineered bacteria comprise one or more gene sequence(s) selected from trpEfbrDCBA, aroGfbr, SerAfbr, trpDH, ipdC, iad, and ΔtrpR, ΔtnaA, and further comprise a mutation and/or deletion in the endogenous pta gene. In some embodiments, the genetically engineered bacteria comprise one or more gene sequence(s) selected from trpEfbrDCBA, aroGfbr, SerAfbr, trpDH, ipdC, iad, and ΔtrpR, ΔtnaA, and further comprise a mutation and/or deletion in the endogenous pta gene and in one or more endogenous genes selected from in the ldhA gene, the frdA gene and the adhE gene. In some embodiments, the genetically engineered bacteria comprise one or more gene sequence(s) selected from trpEfbrDCBA, aroGfbr, SerAfbr, trpDH, ipdC, iad, and ΔtrpR, ΔtnaA, and further comprise a mutation in the endogenous pta and adhE genes. In some embodiments, the genetically engineered bacteria comprise one or more gene sequence(s) selected from trpEfbrDCBA, aroGfbr, SerAfbr, trpDH, ipdC, iad, and ΔtrpR, ΔtnaA, and further comprise a mutation in the endogenous pta and ldhA genes.

[0523] In some embodiments, the genetically engineered bacteria comprise one or more gene sequence(s) selected from trpEfbrDCBA, aroGfbr, SerAfbr, trpDH, ipdC, iad, and ΔtrpR, ΔtnaA, and further comprise a mutation in the endogenous pta and frdA genes. In some embodiments, the genetically engineered bacteria comprise one or more gene sequence(s) selected from trpEfbrDCBA, aroGfbr, SerAfbr, trpDH, ipdC, iad, and ΔtrpR, ΔtnaA, and further comprise a mutation and/or deletion in the endogenous pta, ldhA and frdA genes. In some embodiments, the genetically engineered bacteria comprise one or more gene sequence(s) selected from trpEfbrDCBA, aroGfbr, SerAfbr, trpDH, ipdC, iad, and ΔtrpR, ΔtnaA, and further comprise a mutation in the endogenous pta, ldhA, and adhE genes. In some embodiments, the genetically engineered bacteria comprise one or more gene sequence(s) selected from trpEfbrDCBA, aroGfbr, SerAfbr, trpDH, ipdC, iad, and ΔtrpR, ΔtnaA, and further comprise a mutation in the endogenous pta, frdA and adhE genes. In some embodiments, the genetically engineered bacteria comprise one or more gene sequence(s) selected from trpEfbrDCBA, aroGfbr, SerAfbr, trpDH, ipdC, iad, and ΔtrpR, ΔtnaA, and further comprise a mutation in the endogenous pta, ldhA, frdA, and adhE genes.

[0524] In some embodiments, the genetically engineered bacteria produce 0% to to 2% to 4%, 4% to 6%, 6% to 8%, 8% to 10%, 10% to 12%, 12% to 14%, 14% to 16%, 16% to 18%, 18% to 20%, 20% to 25%, 25% to 30%, 30% to 35%, 35% to 40%, 40% to 45% 45% to 50%, 50% to 55%, 55% to 60%, 60% to 65%, 65% to 70% to 80%, 80% to 90%, or 90% to 100% less acetate than unmodified bacteria of the same bacterial subtype under the same conditions. In yet another embodiment, the genetically engineered bacteria produce 1.0-1.2-fold, 1.2-1.4-fold, 1.4-1.6-fold, 1.6-1.8-fold, 1.8-2-fold, or two-fold less acetate than unmodified bacteria of the same bacterial subtype under the same conditions. In yet another embodiment, the genetically engineered bacteria produce three-fold, four-fold, five-fold, six-fold, seven-fold, eight-fold, nine-fold, ten-fold, fifteen-fold, twenty-fold, thirty-fold, forty-fold, or fifty-fold, less acetate than unmodified bacteria of the same bacterial subtype under the same conditions.

[0525] In some embodiments, the genetically engineered bacteria produce 0% to to 2% to 4%, 4% to 6%, 6% to 8%, 8% to 10%, 10% to 12%, 12% to 14%, 14% to 16%, 16% to 18%, 18% to 20%, 20% to 25%, 25% to 30%, 30% to 35%, 35% to 40%, 40% to 45% 45% to 50%, 50% to 55%, 55% to 60%, 60% to 65%, 65% to 70% to 80%, 80% to 90%, or 90% to 100% more indole-3-acetic acid than unmodified bacteria of the same bacterial subtype under the same conditions. In yet another embodiment, the genetically engineered bacteria produce 1.0-1.2-fold, 1.2-1.4-fold, 1.4-1.6-fold, 1.6-1.8-fold, 1.8-2-fold, or two-fold more indole-3-acetic acid than unmodified bacteria of the same bacterial subtype under the same conditions. In yet another embodiment, the genetically engineered bacteria produce three-fold, four-fold, five-fold, six-fold, seven-fold, eight-fold, nine-fold, ten-fold, fifteen-fold, twenty-fold, thirty-fold, forty-fold, or fifty-fold, more indole-3-acetic acid than unmodified bacteria of the same bacterial subtype under the same conditions.

[0526] In some embodiments, the genetically engineered bacteria are capable of producing Indole Acetic Acid and under inducing conditions, e.g., under a condition(s) associated with inflammation. In some embodiments, the genetically engineered bacteria are capable of producing kynurenine in low-oxygen conditions, in the presence of certain molecules or metabolites, in the presence of molecules or metabolites associated with inflammation or an inflammatory response, or in the presence of some other metabolite that may or may not be present in the gut, such as arabinose.

[0527] In some embodiments, the gene sequences(s) are controlled by an inducible promoter. In some embodiments, the gene sequences(s) are controlled by a constitutive promoter. In some embodiments, the gene sequences(s) are controlled by an inducible and/or constritutive promoter, and are expressed during bacterial culture in vitro, e.g., for bacterial expansion, production and/or manufacture, as described herein.

[0528] Indole-3-Acetonitrile

[0529] In one embodiment, the genetically engineered bacteria comprise one or more gene sequence(s) which encode one or more tryptophan catabolism enzymes, which produce indole-3-acetonitrile from tryptophan. A non-limiting example of such gene sequence(s) which allow in which the genetically engineered bacteria to produce indole-3-acetonitrile from tryptophan is depicted in the figures and examples.

[0530] In one embodiment, the genetically engineered bacteria comprise one or more gene sequence(s) which encode cyp79B2 (tryptophan N-monooxygenase). In one embodiment, the genetically engineered bacteria comprise one or more gene sequence(s) which encode cyp79B2 from Arabidopsis thaliana. In one embodiment, the genetically engineered bacteria comprise one or more gene sequence(s) which encode cyp71a13 (indoleacetaldoxime dehydratase). In one embodiment, the genetically engineered bacteria comprise one or more gene sequence(s) which encode cyp71a13 from Arabidopsis thaliana. In one embodiment, the genetically engineered bacteria comprise one or more gene sequence(s) which encode cyp79B2 and cyp71a13.

[0531] In one embodiment, the genetically engineered bacteria comprise one or more gene sequence(s) which encode cyp79B3 (tryptophan N-monooxygenase) In one embodiment, the genetically engineered bacteria comprise one or more gene sequence(s) which encode cyp79B3 from Arabidopsis thaliana. In one embodiment, the genetically engineered bacteria comprise one or more gene sequence(s) which encode cyp79B3 and cyp71a13. In one embodiment, the genetically engineered bacteria comprise one or more gene sequence(s) which encode cyp79B3, cyp79B2 and cyp71a13.

[0532] In any of these embodiments, the genetically engineered bacteria which produce indole-3-acetonitrile from tryptophan also optionally comprise one or more gene sequence(s) comprising one or more enzymes for tryptophan production, and gene deletions/or mutations as depicted and described in FIG. 40, FIG. 44A and/or FIG. 44B and described elsewhere herein. In some embodiments, AroG and/or TrpE are replaced with feedback resistant versions to improve tryptophan production in the genetically engineered bacteria. In some embodiments, trpR and/or the tnaA gene (encoding a tryptophanase converting tryptophan into indole) are deleted to further increase levels of tryptophan produced.

[0533] In some embodiments, the genetically engineered bacteria which produce indole-3-acetonitrile from tryptophan also optionally comprise one or more gene sequence(s) which encode one or more transporter(s) as described herein, through which tryptophan can be imported. Optionally, in some embodiments, the genetically engineered bacteria which produce indole-3-acetonitrile from tryptophan also optionally comprise one or more gene sequence(s) which encode an exporter as described herein, which can export tryptophan or any of its metabolites.

[0534] To improve acetate production, while maintaining high levels of Indole-3-acetonitrile production, targeted one or more deletions can be introduced in competing metabolic arms of mixed acid fermentation to prevent the production of alternative metabolic fermentative byproducts (thereby increasing acetate production). Non-limiting examples of competing such competing metabolic arms are frdA (converts phosphoenolpyruvate to succinate), ldhA (converts pyruvate to lactate) and adhE (converts Acetyl-CoA to Ethanol). Deletions which may be introduced therefore include deletion of adhE, ldh, and frd. Thus, in certain embodiments, the genetically engineered bacteria comprise one or more Indole-3-acetonitrile production cassette(s) and further comprise mutations and/or deletions in one or more of frdA, ldhA, and adhE.

[0535] In some embodiments, the genetically engineered bacteria comprise one or more Indole-3-acetonitrile production cassette(s) described herein and one or more mutation(s) and/or deletion(s) in one or more genes selected from the ldhA gene, the frdA gene and the adhE gene.

[0536] In some embodiments, the genetically engineered bacteria comprise one or more gene sequence(s) encoding one or more enzymes described herein for the production of Indole-3-acetonitrile and further comprise a mutation and/or deletion in one or more endogenous genes selected from in the ldhA gene, the frdA gene and the adhE genes. In some embodiments, the genetically engineered bacteria comprise one or more gene sequence(s) encoding one or more enzymes described herein for the production of Indole-3-acetonitrile and further comprise a mutation and/or deletion in the endogenous ldhA gene. In some embodiments, the genetically engineered bacteria comprise one or more gene sequence(s) encoding one or more enzymes described herein for the production of Indole-3-acetonitrile and further comprise a mutation and/or deletion in the endogenous adhE gene. In some embodiments, the genetically engineered bacteria comprise one or more gene sequence(s) encoding one or more enzymes described herein for the production of Indole-3-acetonitrile and further comprise a mutation and/or deletion in the endogenous frdA gene. In some embodiments, the genetically engineered bacteria comprise one or more gene sequence(s) encoding one or more enzymes described herein for the production of Indole-3-acetonitrile and further comprise a mutation and/or deletion in the endogenous ldhA and rdA genes. In some embodiments, the genetically engineered bacteria comprise one or more gene sequence(s) encoding one or more enzymes described herein for the production of Indole-3-acetonitrile and further comprise a mutation and/or deletion in the endogenous ldhA genes and adhE genes. In some embodiments, the genetically engineered bacteria comprise one or more gene sequence(s) encoding one or more enzymes described herein for the production of Indole-3-acetonitrile and further comprise a mutation and/or deletion in the endogenous frdA and adhE genes. In some embodiments, the genetically engineered bacteria comprise one or more gene sequence(s) encoding one or more enzymes described herein for the production of Indole-3-acetonitrile and further comprise a mutation and/or deletion in the endogenous ldhA, the frdA, and adhE genes. In some embodiments, the genetically engineered bacteria comprise one or more gene sequence(s) encoding one or more enzymes described herein for the production of Indole-3-acetonitrile and further comprise a mutation and/or deletion in one or more endogenous genes selected from in the ldhA gene, the frdA gene and the adhE genes.

[0537] In some embodiments, the genetically engineered bacteria produce 0% to to 2% to 4%, 4% to 6%, 6% to 8%, 8% to 10%, 10% to 12%, 12% to 14%, 14% to 16%, 16% to 18%, 18% to 20%, 20% to 25%, 25% to 30%, 30% to 35%, 35% to 40%, 40% to 45% 45% to 50%, 50% to 55%, 55% to 60%, 60% to 65%, 65% to 70% to 80%, 80% to 90%, or 90% to 100% more acetate than unmodified bacteria of the same bacterial subtype under the same conditions. In yet another embodiment, the genetically engineered bacteria produce 1.0-1.2-fold, 1.2-1.4-fold, 1.4-1.6-fold, 1.6-1.8-fold, 1.8-2-fold, or two-fold more acetate than unmodified bacteria of the same bacterial subtype under the same conditions. In yet another embodiment, the the genetically engineered bacteria produce three-fold, four-fold, five-fold, six-fold, seven-fold, eight-fold, nine-fold, ten-fold, fifteen-fold, twenty-fold, thirty-fold, forty-fold, or fifty-fold, more acetate than unmodified bacteria of the same bacterial subtype under the same conditions.

[0538] In some embodiments, the genetically engineered bacteria produce 0% to 2% to 4%, 4% to 6%, 6% to 8%, 8% to 10%, 10% to 12%, 12% to 14%, 14% to 16%, 16% to 18%, 18% to 20%, 20% to 25%, 25% to 30%, 30% to 35%, 35% to 40%, 40% to 45% 45% to 50%, 50% to 55%, 55% to 60%, 60% to 65%, 65% to 70% to 80%, 80% to 90%, or 90% to 100% more Indole-3-acetonitrile than unmodified bacteria of the same bacterial subtype under the same conditions. In yet another embodiment, the genetically engineered bacteria produce 1.0-1.2-fold, 1.2-1.4-fold, 1.4-1.6-fold, 1.6-1.8-fold, 1.8-2-fold, or two-fold more Indole-3-acetonitrile than unmodified bacteria of the same bacterial subtype under the same conditions. In yet another embodiment, the the genetically engineered bacteria produce three-fold, four-fold, five-fold, six-fold, seven-fold, eight-fold, nine-fold, ten-fold, fifteen-fold, twenty-fold, thirty-fold, forty-fold, or fifty-fold, more Indole-3-acetonitrile than unmodified bacteria of the same bacterial subtype under the same conditions.

[0539] In certain situations, the need may arise to prevent and/or reduce acetate production by of an engineered or naturally occurring strain, e.g., E. coli Nissle, while maintaining high levels of Indole-3-acetonitrile production. Without wishing to be bound by theory, one or more mutations and/or deletions in one or more gene(s) encoding in one or more enzymes described herein which function in the acetate producing metabolic arm of fermentation should reduce and/or prevent production of acetate. A non-limiting example of such an enzyme is phosphate acetyltransferase (Pta), which is the first enzyme in the metabolic arm converting acetyl-CoA to acetate. Deletion and/or mutation of the Pta gene or a gene encoding another enzyme in this metabolic arm may also allow for more acetyl-CoA to be used for indole-3-acetonitrile production. Additionally, one or more mutations preventing or reducing the flow through other metabolic arms of mixed acid fermentation, such as those which produce succinate, lactate, and/or ethanol can increase the production of acetyl-CoA, which is available for Indole-3-acetonitrile synthesis. Such mutations and/or deletions, include but are not limited to mutations and/or deletions in the frdA, ldhA, and/or adhE genes.

[0540] In some embodiments, the genetically engineered bacteria comprise one or more gene sequence(s) encoding one or more enzymes described herein for the production of Indole-3-acetonitrile and further comprise a mutation and/or deletion in the endogenous pta gene. In some embodiments, the genetically engineered bacteria comprise one or more gene sequence(s) encoding one or more enzymes described herein for the production of Indole-3-acetonitrile and further comprise a mutation and/or deletion in the endogenous pta gene and in one or more endogenous genes selected from in the ldhA gene, the frdA gene and the adhE gene. In some embodiments, the genetically engineered bacteria comprise one or more gene sequence(s) encoding one or more enzymes described herein for the production of Indole-3-acetonitrile and further comprise a mutation in the endogenous pta and adhE genes. In some embodiments, the genetically engineered bacteria comprise one or more gene sequence(s) encoding one or more enzymes described herein for the production of Indole-3-acetonitrile and further comprise a mutation in the endogenous pta and ldhA genes. In some embodiments, the genetically engineered bacteria comprise one or more gene sequence(s) encoding one or more enzymes described herein for the production of Indole-3-acetonitrile and further comprise a mutation in the endogenous pta and frdA genes. In some embodiments, the genetically engineered bacteria comprise one or more gene sequence(s) encoding one or more enzymes described herein for the production of Indole-3-acetonitrile and further comprise a mutation and/or deletion in the endogenous pta, ldhA and frdA genes. In some embodiments, the genetically engineered bacteria comprise one or more gene sequence(s) encoding one or more enzymes described herein for the production of Indole-3-acetonitrile and further comprise a mutation in the endogenous pta, ldhA, and adhE genes. In some embodiments, the genetically engineered bacteria comprise one or more gene sequence(s) encoding one or more enzymes described herein for the production of Indole-3-acetonitrile and further comprise a mutation in the endogenous pta, frdA and adhE genes. In some embodiments, the genetically engineered bacteria comprise one or more gene sequence(s) encoding one or more enzyme(s) for the production of Indole-3-acetonitrile and further comprise a mutation and/or deletion in the endogenous pta, ldhA, frdA, and adhE genes.

[0541] In some embodiments, the genetically engineered bacteria produce 0% to to 2% to 4%, 4% to 6%, 6% to 8%, 8% to 10%, 10% to 12%, 12% to 14%, 14% to 16%, 16% to 18%, 18% to 20%, 20% to 25%, 25% to 30%, 30% to 35%, 35% to 40%, 40% to 45% 45% to 50%, 50% to 55%, 55% to 60%, 60% to 65%, 65% to 70% to 80%, 80% to 90%, or 90% to 100% less acetate than unmodified bacteria of the same bacterial subtype under the same conditions. In yet another embodiment, the genetically engineered bacteria produce 1.0-1.2-fold, 1.2-1.4-fold, 1.4-1.6-fold, 1.6-1.8-fold, 1.8-2-fold, or two-fold less acetate than unmodified bacteria of the same bacterial subtype under the same conditions. In yet another embodiment, the genetically engineered bacteria produce three-fold, four-fold, five-fold, six-fold, seven-fold, eight-fold, nine-fold, ten-fold, fifteen-fold, twenty-fold, thirty-fold, forty-fold, or fifty-fold, less acetate than unmodified bacteria of the same bacterial subtype under the same conditions.

[0542] In some embodiments, the genetically engineered bacteria produce 0% to to 2% to 4%, 4% to 6%, 6% to 8%, 8% to 10%, 10% to 12%, 12% to 14%, 14% to 16%, 16% to 18%, 18% to 20%, 20% to 25%, 25% to 30%, 30% to 35%, 35% to 40%, 40% to 45% 45% to 50%, 50% to 55%, 55% to 60%, 60% to 65%, 65% to 70% to 80%, 80% to 90%, or 90% to 100% more Indole-3-acetonitrile than unmodified bacteria of the same bacterial subtype under the same conditions. In yet another embodiment, the genetically engineered bacteria produce 1.0-1.2-fold, 1.2-1.4-fold, 1.4-1.6-fold, 1.6-1.8-fold, 1.8-2-fold, or two-fold more Indole-3-acetonitrile than unmodified bacteria of the same bacterial subtype under the same conditions. In yet another embodiment, the genetically engineered bacteria produce three-fold, four-fold, five-fold, six-fold, seven-fold, eight-fold, nine-fold, ten-fold, fifteen-fold, twenty-fold, thirty-fold, forty-fold, or fifty-fold, more Indole-3-acetonitrile than unmodified bacteria of the same bacterial subtype under the same conditions.

[0543] In some embodiments, the gene sequences(s) are controlled by an inducible promoter. In some embodiments, the gene sequences(s) are controlled by a constitutive promoter. In some embodiments, the gene sequences(s) are controlled by an inducible and/or constritutive promoter, and are expressed during bacterial culture in vitro, e.g., for bacterial expansion, production and/or manufacture, as described herein.

[0544] Indole-3-Propionic Acid (IPA)

[0545] In one embodiment, the genetically engineered bacteria comprise one or more gene sequence(s) which encode one or more tryptophan catabolism enzymes, which produce indole-3-propionic acid from tryptophan. FIG. 47 and FIG. 48, and FIG. 43C depict schematics of exemplary circuits for the production of indole-3-propionic acid.

[0546] In some embodiments, the genetically engineered bacteria comprise one or more gene sequences encoding tryptophan ammonia lyase. In some embodiments, the genetically engineered bacteria comprise one or more gene sequences encoding tryptophan ammonia lyase from Rubrivivax benzoatilyticus. In some embodiments, the genetically engineered bacteria comprise one or more gene sequences encoding indole-3-acrylate reductase. In some embodiments, the genetically engineered bacteria comprise one or more gene sequences encoding indole-3-acrylate reductase from Clostridium botulinum. In some embodiments, the genetically engineered bacteria comprise one or more gene sequences encoding a tryptophan ammonia lyase and an indole-3-acrylate reductase. In some embodiments, the indole-3-propionate-producing strain optionally produces tryptophan from a chorismate precursor, and the strain optionally comprises additional circuits for tryptophan production and/or tryptophan uptake/transport s described herein.

[0547] The genetically engineered bacteria comprise a circuit, comprising trpDH (Tryptophan dehydrogenase, e.g., from Nostoc punctiforme NIES-2108, which produces (indol-3yl)pyruvate from tryptophan), fldA (indole-3-propionyl-CoA:indole-3-lactate CoA transferase, e.g., from Clostridium sporogenes, which converts converts indole-3-lactate and indol-3-propionyl-CoA to indole-3-propionic acid and indole-3-lactate-CoA), fldB and fldC (indole-3-lactate dehydratase e.g., from Clostridium sporogenes, which converts indole-3-lactate-CoA to indole-3-acrylyl-CoA) fldD and/or AcuI: (indole-3-acrylyl-CoA reductase, e.g., from Clostridium sporogenes and/or acrylyl-CoA reductase, e.g., from Rhodobacter sphaeroides, which convert indole-3-acrylyl-CoA to indole-3-propionyl-CoA). The circuits further comprise fldH1 and/or fldH2 (indole-3-lactate dehydrogenase 1 and/or 2, e.g., from Clostridium sporogenes), which converts (indol-3-yl)pyruvate into indole-3-lactate) (see, e.g., FIG. 48).

[0548] Another embodiment of the IPA producing strain is shown in FIG. 47.

[0549] In some embodiments, the genetically engineered bacteria comprise one or more gene sequences encoding trpDH (Tryptophan dehydrogenase). In some embodiments, the genetically engineered bacteria comprise one or more gene sequences encoding trpDH from Nostoc punctiforme NIES-2108. In some embodiments, the genetically engineered bacteria comprise one or more gene sequences encoding fldA (indole-3-propionyl-CoA:indole-3-lactate CoA transferase). In some embodiments, the genetically engineered bacteria comprise one or more gene sequences encoding fldA from Clostridium sporogenes. In some embodiments, the genetically engineered bacteria comprise one or more gene sequences encoding fldB and fldC (indole-3-lactate dehydratase). In some embodiments, the genetically engineered bacteria comprise one or more gene sequences encoding fldB and fldC Clostridium sporogenes. In some embodiments, the genetically engineered bacteria comprise one or more gene sequences encoding fldD (indole-3-acrylyl-CoA reductase). In some embodiments, the genetically engineered bacteria comprise one or more gene sequences encoding fldD from Clostridium sporogenes. In some embodiments, the genetically engineered bacteria comprise one or more gene sequences encoding AcuI (acrylyl-CoA reductase). In some embodiments, the genetically engineered bacteria comprise one or more gene sequences encoding AcuI from Rhodobacter sphaeroides. In some embodiments, the genetically engineered bacteria comprise one or more gene sequences encoding fldH1 (3-lactate dehydrogenase 1). In some embodiments, the genetically engineered bacteria comprise one or more gene sequences encoding fldH1 from Clostridium sporogenes. In some embodiments, the genetically engineered bacteria comprise one or more gene sequences encoding fldH2 (indole-3-lactate dehydrogenase 2). In some embodiments, the genetically engineered bacteria comprise one or more gene sequences encoding fldH2 from Clostridium sporogenes). In some embodiments, the genetically engineered bacteria comprise one or more gene sequences encoding trpDH and/or fldA and/or fldB and/or flD and/or fldH1. In some embodiments, the genetically engineered bacteria comprise one or more gene sequences encoding trpDH and/or fldA and/or fldB and/or flD and/or fldH2. In some embodiments, the genetically engineered bacteria comprise one or more gene sequences encoding trpDH and/or fldA and/or fldB and/or acuI and/or fldH1. In some embodiments, the genetically engineered bacteria comprise one or more gene sequences encoding trpDH and/or fldA and/or fldB and/or acuI and/or fldH2. In some embodiments, the genetically engineered bacteria comprise one or more gene sequences encoding trpDH and fldA and fldB and flD and fldH1. In some embodiments, the genetically engineered bacteria comprise one or more gene sequences encoding trpDH and fldA and fldB and flD and fldH2. In some embodiments, the genetically engineered bacteria comprise one or more gene sequences encoding trpDH and fldA and fldB and acuI and fldH1. In some embodiments, the genetically engineered bacteria comprise one or more gene sequences encoding trpDH and fldA and fldB and acuI and fldH2.

[0550] In any of these embodiments, the genetically engineered bacteria which produce indole-3-propionic acid also optionally comprise one or more gene sequence(s) comprising one or more enzymes for tryptophan production, and gene deletions/or mutations as depicted and described in FIG. 40, FIG. 44A and/or FIG. 44B and described elsewhere herein. In some embodiments, AroG and/or TrpE are replaced with feedback resistant versions to improve tryptophan production in the genetically engineered bacteria. In some embodiments, trpR and/or the tnaA gene (encoding a tryptophanase converting tryptophan into indole) are deleted to further increase levels of tryptophan produced. In some embodiments, the genetically engineered bacteria which produce indole-3-propionic acid also optionally comprise one or more gene sequence(s) which encode one or more transporter(s) as described herein, through which tryptophan can be imported. Optionally, in some embodiments, the genetically engineered bacteria which produce indole-3-propionic acid also optionally comprise one or more gene sequence(s) which encode an exporter as described herein, which can export tryptophan or any of its metabolites.

[0551] To improve acetate production, while maintaining high levels of Indole-3-propionic acid production, targeted one or more deletions can be introduced in competing metabolic arms of mixed acid fermentation to prevent the production of alternative metabolic fermentative byproducts (thereby increasing acetate production). Non-limiting examples of competing such competing metabolic arms are frdA (converts phosphoenolpyruvate to succinate), ldhA (converts pyruvate to lactate) and adhE (converts Acetyl-CoA to Ethanol). Deletions which may be introduced therefore include deletion of adhE, ldh, and frd. Thus, in certain embodiments, the genetically engineered bacteria comprise one or more Indole-3-propionic acid production cassette(s) and further comprise mutations and/or deletions in one or more of frdA, ldhA, and adhE.

[0552] In some embodiments, the genetically engineered bacteria comprise one or more Indole-3-propionic acid production cassette(s) described herein and one or more mutation(s) and/or deletion(s) in one or more genes selected from the ldhA gene, the frdA gene and the adhE gene.

[0553] In some embodiments, the genetically engineered bacteria comprise one or more gene sequence(s) encoding one or more enzymes described herein for the production of Indole-3-propionic acid and further comprise a mutation and/or deletion in one or more endogenous genes selected from in the ldhA gene, the frdA gene and the adhE genes. In some embodiments, the genetically engineered bacteria comprise one or more gene sequence(s) encoding one or more enzymes described herein for the production of Indole-3-propionic acid and further comprise a mutation and/or deletion in the endogenous ldhA gene. In some embodiments, the genetically engineered bacteria comprise one or more gene sequence(s) encoding one or more enzymes described herein for the production of Indole-3-propionic acid and further comprise a mutation and/or deletion in the endogenous adhE gene. In some embodiments, the genetically engineered bacteria comprise one or more gene sequence(s) encoding one or more enzymes described herein for the production of Indole-3-propionic acid and further comprise a mutation and/or deletion in the endogenous frdA gene. In some embodiments, the genetically engineered bacteria comprise one or more gene sequence(s) encoding one or more enzymes described herein for the production of Indole-3-propionic acid and further comprise a mutation and/or deletion in the endogenous ldhA and rdA genes. In some embodiments, the genetically engineered bacteria comprise one or more gene sequence(s) encoding one or more enzymes described herein for the production of Indole-3-propionic acid and further comprise a mutation and/or deletion in the endogenous ldhA genes and adhE genes. In some embodiments, the genetically engineered bacteria comprise one or more gene sequence(s) encoding one or more enzymes described herein for the production of Indole-3-propionic acid and further comprise a mutation and/or deletion in the endogenous frdA and adhE genes. In some embodiments, the genetically engineered bacteria comprise one or more gene sequence(s) encoding one or more enzymes described herein for the production of Indole-3-propionic acid and further comprise a mutation and/or deletion in the endogenous ldhA, the frdA, and adhE genes. In some embodiments, the genetically engineered bacteria comprise one or more gene sequence(s) encoding one or more enzymes described herein for the production of Indole-3-propionic acid and further comprise a mutation and/or deletion in one or more endogenous genes selected from in the ldhA gene, the frdA gene and the adhE genes.

[0554] In some embodiments, the genetically engineered bacteria produce 0% to to 2% to 4%, 4% to 6%, 6% to 8%, 8% to 10%, 10% to 12%, 12% to 14%, 14% to 16%, 16% to 18%, 18% to 20%, 20% to 25%, 25% to 30%, 30% to 35%, 35% to 40%, 40% to 45% 45% to 50%, 50% to 55%, 55% to 60%, 60% to 65%, 65% to 70% to 80%, 80% to 90%, or 90% to 100% more acetate than unmodified bacteria of the same bacterial subtype under the same conditions. In yet another embodiment, the genetically engineered bacteria produce 1.0-1.2-fold, 1.2-1.4-fold, 1.4-1.6-fold, 1.6-1.8-fold, 1.8-2-fold, or two-fold more acetate than unmodified bacteria of the same bacterial subtype under the same conditions. In yet another embodiment, the the genetically engineered bacteria produce three-fold, four-fold, five-fold, six-fold, seven-fold, eight-fold, nine-fold, ten-fold, fifteen-fold, twenty-fold, thirty-fold, forty-fold, or fifty-fold, more acetate than unmodified bacteria of the same bacterial subtype under the same conditions.

[0555] In some embodiments, the genetically engineered bacteria produce 0% to 2% to 4%, 4% to 6%, 6% to 8%, 8% to 10%, 10% to 12%, 12% to 14%, 14% to 16%, 16% to 18%, 18% to 20%, 20% to 25%, 25% to 30%, 30% to 35%, 35% to 40%, 40% to 45% 45% to 50%, 50% to 55%, 55% to 60%, 60% to 65%, 65% to 70% to 80%, 80% to 90%, or 90% to 100% more Indole-3-propionic acid than unmodified bacteria of the same bacterial subtype under the same conditions. In yet another embodiment, the genetically engineered bacteria produce 1.0-1.2-fold, 1.2-1.4-fold, 1.4-1.6-fold, 1.6-1.8-fold, 1.8-2-fold, or two-fold more Indole-3-propionic acid than unmodified bacteria of the same bacterial subtype under the same conditions. In yet another embodiment, the the genetically engineered bacteria produce three-fold, four-fold, five-fold, six-fold, seven-fold, eight-fold, nine-fold, ten-fold, fifteen-fold, twenty-fold, thirty-fold, forty-fold, or fifty-fold, more Indole-3-propionic acid than unmodified bacteria of the same bacterial subtype under the same conditions.

[0556] In certain situations, the need may arise to prevent and/or reduce acetate production by of an engineered or naturally occurring strain, e.g., E. coli Nissle, while maintaining high levels of Indole-3-propionic acid production. Without wishing to be bound by theory, one or more mutations and/or deletions in one or more gene(s) encoding in one or more enzymes described herein which function in the acetate producing metabolic arm of fermentation should reduce and/or prevent production of acetate. A non-limiting example of such an enzyme is phosphate acetyltransferase (Pta), which is the first enzyme in the metabolic arm converting acetyl-CoA to acetate. Deletion and/or mutation of the Pta gene or a gene encoding another enzyme in this metabolic arm may also allow for more acetyl-CoA to be used for Indole-3-propionic acid production. Additionally, one or more mutations preventing or reducing the flow through other metabolic arms of mixed acid fermentation, such as those which produce succinate, lactate, and/or ethanol can increase the production of acetyl-CoA, which is available for Indole-3-propionic acid synthesis. Such mutations and/or deletions, include but are not limited to mutations and/or deletions in the frdA, ldhA, and/or adhE genes.

[0557] In some embodiments, the genetically engineered bacteria comprise one or more gene sequence(s) encoding one or more enzymes described herein for the production of Indole-3-propionic acid and further comprise a mutation and/or deletion in the endogenous pta gene. In some embodiments, the genetically engineered bacteria comprise one or more gene sequence(s) encoding one or more enzymes described herein for the production of Indole-3-propionic acid and further comprise a mutation and/or deletion in the endogenous pta gene and in one or more endogenous genes selected from in the ldhA gene, the frdA gene and the adhE gene. In some embodiments, the genetically engineered bacteria comprise one or more gene sequence(s) encoding one or more enzymes described herein for the production of Indole-3-propionic acid and further comprise a mutation in the endogenous pta and adhE genes. In some embodiments, the genetically engineered bacteria comprise one or more gene sequence(s) encoding one or more enzymes described herein for the production of Indole-3-propionic acid and further comprise a mutation in the endogenous pta and ldhA genes. In some embodiments, the genetically engineered bacteria comprise one or more gene sequence(s) encoding one or more enzymes described herein for the production of Indole-3-propionic acid and further comprise a mutation in the endogenous pta and frdA genes. In some embodiments, the genetically engineered bacteria comprise one or more gene sequence(s) encoding one or more enzymes described herein for the production of Indole-3-propionic acid and further comprise a mutation and/or deletion in the endogenous pta, ldhA and frdA genes. In some embodiments, the genetically engineered bacteria comprise one or more gene sequence(s) encoding one or more enzymes described herein for the production of Indole-3-propionic acid and further comprise a mutation in the endogenous pta, ldhA, and adhE genes. In some embodiments, the genetically engineered bacteria comprise one or more gene sequence(s) encoding one or more enzymes described herein for the production of Indole-3-propionic acid and further comprise a mutation in the endogenous pta, frdA and adhE genes. In some embodiments, the genetically engineered bacteria comprise one or more gene sequence(s) encoding one or more enzyme(s) for the production of Indole-3-propionic acid and further comprise a mutation and/or deletion in the endogenous pta, ldhA, frdA, and adhE genes.

[0558] In some embodiments, the genetically engineered bacteria produce 0% to to 2% to 4%, 4% to 6%, 6% to 8%, 8% to 10%, 10% to 12%, 12% to 14%, 14% to 16%, 16% to 18%, 18% to 20%, 20% to 25%, 25% to 30%, 30% to 35%, 35% to 40%, 40% to 45% 45% to 50%, 50% to 55%, 55% to 60%, 60% to 65%, 65% to 70% to 80%, 80% to 90%, or 90% to 100% less acetate than unmodified bacteria of the same bacterial subtype under the same conditions. In yet another embodiment, the genetically engineered bacteria produce 1.0-1.2-fold, 1.2-1.4-fold, 1.4-1.6-fold, 1.6-1.8-fold, 1.8-2-fold, or two-fold less acetate than unmodified bacteria of the same bacterial subtype under the same conditions. In yet another embodiment, the genetically engineered bacteria produce three-fold, four-fold, five-fold, six-fold, seven-fold, eight-fold, nine-fold, ten-fold, fifteen-fold, twenty-fold, thirty-fold, forty-fold, or fifty-fold, less acetate than unmodified bacteria of the same bacterial subtype under the same conditions.

[0559] In some embodiments, the genetically engineered bacteria produce 0% to to 2% to 4%, 4% to 6%, 6% to 8%, 8% to 10%, 10% to 12%, 12% to 14%, 14% to 16%, 16% to 18%, 18% to 20%, 20% to 25%, 25% to 30%, 30% to 35%, 35% to 40%, 40% to 45% 45% to 50%, 50% to 55%, 55% to 60%, 60% to 65%, 65% to 70% to 80%, 80% to 90%, or 90% to 100% more Indole-3-propionic acid than unmodified bacteria of the same bacterial subtype under the same conditions. In yet another embodiment, the genetically engineered bacteria produce 1.0-1.2-fold, 1.2-1.4-fold, 1.4-1.6-fold, 1.6-1.8-fold, 1.8-2-fold, or two-fold more Indole-3-propionic acid than unmodified bacteria of the same bacterial subtype under the same conditions. In yet another embodiment, the genetically engineered bacteria produce three-fold, four-fold, five-fold, six-fold, seven-fold, eight-fold, nine-fold, ten-fold, fifteen-fold, twenty-fold, thirty-fold, forty-fold, or fifty-fold, more Indole-3-propionic acid than unmodified bacteria of the same bacterial subtype under the same conditions.

[0560] In certain embodiments, the genetically engineered bacteria comprise one or more gene sequence(s) encoding one or more enzymes for the production of tryptophan metabolites. In some embodiments, the genetically engineered bacteria comprise one or more gene sequence(s) encoding 1, 2, 3, 4, 5, 6, 7, 8, 9, 10 different tryptophan metabolites. In certain embodiments the bacteria comprise one or more gene sequence(s) encoding one or more enzymes for the production of tryptophan metabolites selected from tryptamine and/or indole-3 acetaladehyde, indole-3acetonitrile, kynurenine, kynurenic acid, indole, indole acetic acid FICZ, indole-3-propionic acid.

[0561] In some embodiments, the genetically engineered bacteria are capable of producing such tryptophan metabolites under inducing conditions, e.g., under a condition(s) associated with inflammation. In some embodiments, the genetically engineered bacteria are capable of producing such tryptophan metabolites in low-oxygen conditions, in the presence of certain molecules or metabolites, in the presence of molecules or metabolites associated with inflammation or an inflammatory response, or in the presence of some other metabolite that may or may not be present in the gut, such as arabinose.

[0562] In some embodiments, the gene sequences(s) are controlled by an inducible promoter. In some embodiments, the gene sequences(s) are controlled by a constitutive promoter. In some embodiments, the gene sequences(s) are controlled by an inducible and/or constritutive promoter, and are expressed during bacterial culture in vitro, e.g., for bacterial expansion, production and/or manufacture, as described herein.

[0563] Indole

[0564] In one embodiment, the genetically engineered bacteria comprise one or more gene sequence(s) which encode one or more tryptophan catabolism enzymes, which produce indole from tryptophan. Non-limiting example of such gene sequence(s) are shown FIG. 41G and described elsewhere herein. In one embodiment, the genetically engineered bacteria comprise one or more gene sequence(s) which encode tnaA (tryptophanase). In one embodiment, the genetically engineered bacteria comprise one or more gene sequence(s) which encode tnaA from E. coli.

[0565] In any of these embodiments, the genetically engineered bacteria which produce indole from tryptophan also optionally comprise one or more gene sequence(s) comprising one or more enzymes for tryptophan production, and gene deletions/or mutations as depicted and described in FIG. 40, FIG. 44A and/or FIG. 44B and described elsewhere herein. In some embodiments, AroG and/or TrpE are replaced with feedback resistant versions to improve tryptophan production in the genetically engineered bacteria. In some embodiments, trpR and/or the tnaA gene (encoding a tryptophanase converting tryptophan into indole) are deleted to further increase levels of tryptophan produced. In some embodiments, the genetically engineered bacteria which produce indole from tryptophan also optionally comprise one or more gene sequence(s) which encode one or more transporter(s) as described herein, through which tryptophan can be imported. Optionally, in some embodiments, the genetically engineered bacteria which produce indole from tryptophan also optionally comprise one or more gene sequence(s) which encode an exporter as described herein, which can export tryptophan or any of its metabolites.

[0566] To improve acetate production, while maintaining high levels of Indole production, targeted one or more deletions can be introduced in competing metabolic arms of mixed acid fermentation to prevent the production of alternative metabolic fermentative byproducts (thereby increasing acetate production). Non-limiting examples of competing such competing metabolic arms are frdA (converts phosphoenolpyruvate to succinate), ldhA (converts pyruvate to lactate) and adhE (converts Acetyl-CoA to Ethanol). Deletions which may be introduced therefore include deletion of adhE, ldh, and frd. Thus, in certain embodiments, the genetically engineered bacteria comprise one or more Indole production cassette(s) and further comprise mutations and/or deletions in one or more of frdA, ldhA, and adhE.

[0567] In some embodiments, the genetically engineered bacteria comprise one or more Indole production cassette(s) described herein and one or more mutation(s) and/or deletion(s) in one or more genes selected from the ldhA gene, the frdA gene and the adhE gene.

[0568] In some embodiments, the genetically engineered bacteria comprise one or more gene sequence(s) encoding one or more enzymes described herein for the production of Indole and further comprise a mutation and/or deletion in one or more endogenous genes selected from in the ldhA gene, the frdA gene and the adhE genes. In some embodiments, the genetically engineered bacteria comprise one or more gene sequence(s) encoding one or more enzymes described herein for the production of Indole and further comprise a mutation and/or deletion in the endogenous ldhA gene. In some embodiments, the genetically engineered bacteria comprise one or more gene sequence(s) encoding one or more enzymes described herein for the production of Indole and further comprise a mutation and/or deletion in the endogenous adhE gene. In some embodiments, the genetically engineered bacteria comprise one or more gene sequence(s) encoding one or more enzymes described herein for the production of Indole and further comprise a mutation and/or deletion in the endogenous frdA gene. In some embodiments, the genetically engineered bacteria comprise one or more gene sequence(s) encoding one or more enzymes described herein for the production of Indole and further comprise a mutation and/or deletion in the endogenous ldhA and rdA genes. In some embodiments, the genetically engineered bacteria comprise one or more gene sequence(s) encoding one or more enzymes described herein for the production of Indole and further comprise a mutation and/or deletion in the endogenous ldhA genes and adhE genes. In some embodiments, the genetically engineered bacteria comprise one or more gene sequence(s) encoding one or more enzymes described herein for the production of Indole and further comprise a mutation and/or deletion in the endogenous frdA and adhE genes. In some embodiments, the genetically engineered bacteria comprise one or more gene sequence(s) encoding one or more enzymes described herein for the production of Indole and further comprise a mutation and/or deletion in the endogenous ldhA, the frdA, and adhE genes. In some embodiments, the genetically engineered bacteria comprise one or more gene sequence(s) encoding one or more enzymes described herein for the production of Indole and further comprise a mutation and/or deletion in one or more endogenous genes selected from in the ldhA gene, the frdA gene and the adhE genes.

[0569] In some embodiments, the genetically engineered bacteria produce 0% to to 2% to 4%, 4% to 6%, 6% to 8%, 8% to 10%, 10% to 12%, 12% to 14%, 14% to 16%, 16% to 18%, 18% to 20%, 20% to 25%, 25% to 30%, 30% to 35%, 35% to 40%, 40% to 45% 45% to 50%, 50% to 55%, 55% to 60%, 60% to 65%, 65% to 70% to 80%, 80% to 90%, or 90% to 100% more acetate than unmodified bacteria of the same bacterial subtype under the same conditions. In yet another embodiment, the genetically engineered bacteria produce 1.0-1.2-fold, 1.2-1.4-fold, 1.4-1.6-fold, 1.6-1.8-fold, 1.8-2-fold, or two-fold more acetate than unmodified bacteria of the same bacterial subtype under the same conditions. In yet another embodiment, the the genetically engineered bacteria produce three-fold, four-fold, five-fold, six-fold, seven-fold, eight-fold, nine-fold, ten-fold, fifteen-fold, twenty-fold, thirty-fold, forty-fold, or fifty-fold, more acetate than unmodified bacteria of the same bacterial subtype under the same conditions.

[0570] In some embodiments, the genetically engineered bacteria produce 0% to 2% to 4%, 4% to 6%, 6% to 8%, 8% to 10%, 10% to 12%, 12% to 14%, 14% to 16%, 16% to 18%, 18% to 20%, 20% to 25%, 25% to 30%, 30% to 35%, 35% to 40%, 40% to 45% 45% to 50%, 50% to 55%, 55% to 60%, 60% to 65%, 65% to 70% to 80%, 80% to 90%, or 90% to 100% more Indole than unmodified bacteria of the same bacterial subtype under the same conditions. In yet another embodiment, the genetically engineered bacteria produce 1.0-1.2-fold, 1.2-1.4-fold, 1.4-1.6-fold, 1.6-1.8-fold, 1.8-2-fold, or two-fold more Indole than unmodified bacteria of the same bacterial subtype under the same conditions. In yet another embodiment, the the genetically engineered bacteria produce three-fold, four-fold, five-fold, six-fold, seven-fold, eight-fold, nine-fold, ten-fold, fifteen-fold, twenty-fold, thirty-fold, forty-fold, or fifty-fold, more Indole than unmodified bacteria of the same bacterial subtype under the same conditions.

[0571] In certain situations, the need may arise to prevent and/or reduce acetate production by of an engineered or naturally occurring strain, e.g., E. coli Nissle, while maintaining high levels of Indole production. Without wishing to be bound by theory, one or more mutations and/or deletions in one or more gene(s) encoding in one or more enzymes described herein which function in the acetate producing metabolic arm of fermentation should reduce and/or prevent production of acetate. A non-limiting example of such an enzyme is phosphate acetyltransferase (Pta), which is the first enzyme in the metabolic arm converting acetyl-CoA to acetate. Deletion and/or mutation of the Pta gene or a gene encoding another enzyme in this metabolic arm may also allow for more acetyl-CoA to be used for Indole production. Additionally, one or more mutations preventing or reducing the flow through other metabolic arms of mixed acid fermentation, such as those which produce succinate, lactate, and/or ethanol can increase the production of acetyl-CoA, which is available for indole synthesis. Such mutations and/or deletions, include but are not limited to mutations and/or deletions in the frdA, ldhA, and/or adhE genes.

[0572] In some embodiments, the genetically engineered bacteria comprise one or more gene sequence(s) encoding one or more enzymes described herein for the production of Indole and further comprise a mutation and/or deletion in the endogenous pta gene. In some embodiments, the genetically engineered bacteria comprise one or more gene sequence(s) encoding one or more enzymes described herein for the production of Indole and further comprise a mutation and/or deletion in the endogenous pta gene and in one or more endogenous genes selected from in the ldhA gene, the frdA gene and the adhE gene. In some embodiments, the genetically engineered bacteria comprise one or more gene sequence(s) encoding one or more enzymes described herein for the production of Indole and further comprise a mutation in the endogenous pta and adhE genes. In some embodiments, the genetically engineered bacteria comprise one or more gene sequence(s) encoding one or more enzymes described herein for the production of Indole and further comprise a mutation in the endogenous pta and ldhA genes. In some embodiments, the genetically engineered bacteria comprise one or more gene sequence(s) encoding one or more enzymes described herein for the production of Indole and further comprise a mutation in the endogenous pta and frdA genes. In some embodiments, the genetically engineered bacteria comprise one or more gene sequence(s) encoding one or more enzymes described herein for the production of Indole and further comprise a mutation and/or deletion in the endogenous pta, ldhA and frdA genes. In some embodiments, the genetically engineered bacteria comprise one or more gene sequence(s) encoding one or more enzymes described herein for the production of Indole and further comprise a mutation in the endogenous pta, ldhA, and adhE genes. In some embodiments, the genetically engineered bacteria comprise one or more gene sequence(s) encoding one or more enzymes described herein for the production of Indole and further comprise a mutation in the endogenous pta, frdA and adhE genes. In some embodiments, the genetically engineered bacteria comprise one or more gene sequence(s) encoding one or more enzyme(s) for the production of Indole and further comprise a mutation and/or deletion in the endogenous pta, ldhA, frdA, and adhE genes.

[0573] In some embodiments, the genetically engineered bacteria produce 0% to to 2% to 4%, 4% to 6%, 6% to 8%, 8% to 10%, 10% to 12%, 12% to 14%, 14% to 16%, 16% to 18%, 18% to 20%, 20% to 25%, 25% to 30%, 30% to 35%, 35% to 40%, 40% to 45% 45% to 50%, 50% to 55%, 55% to 60%, 60% to 65%, 65% to 70% to 80%, 80% to 90%, or 90% to 100% less acetate than unmodified bacteria of the same bacterial subtype under the same conditions. In yet another embodiment, the genetically engineered bacteria produce 1.0-1.2-fold, 1.2-1.4-fold, 1.4-1.6-fold, 1.6-1.8-fold, 1.8-2-fold, or two-fold less acetate than unmodified bacteria of the same bacterial subtype under the same conditions. In yet another embodiment, the genetically engineered bacteria produce three-fold, four-fold, five-fold, six-fold, seven-fold, eight-fold, nine-fold, ten-fold, fifteen-fold, twenty-fold, thirty-fold, forty-fold, or fifty-fold, less acetate than unmodified bacteria of the same bacterial subtype under the same conditions.

[0574] In some embodiments, the genetically engineered bacteria produce 0% to to 2% to 4%, 4% to 6%, 6% to 8%, 8% to 10%, 10% to 12%, 12% to 14%, 14% to 16%, 16% to 18%, 18% to 20%, 20% to 25%, 25% to 30%, 30% to 35%, 35% to 40%, 40% to 45% 45% to 50%, 50% to 55%, 55% to 60%, 60% to 65%, 65% to 70% to 80%, 80% to 90%, or 90% to 100% more Indole than unmodified bacteria of the same bacterial subtype under the same conditions. In yet another embodiment, the genetically engineered bacteria produce 1.0-1.2-fold, 1.2-1.4-fold, 1.4-1.6-fold, 1.6-1.8-fold, 1.8-2-fold, or two-fold more Indole than unmodified bacteria of the same bacterial subtype under the same conditions. In yet another embodiment, the genetically engineered bacteria produce three-fold, four-fold, five-fold, six-fold, seven-fold, eight-fold, nine-fold, ten-fold, fifteen-fold, twenty-fold, thirty-fold, forty-fold, or fifty-fold, more Indole than unmodified bacteria of the same bacterial subtype under the same conditions.

[0575] In some embodiments, the genetically engineered bacteria are capable of producing Indole-3-acetonitrile under inducing conditions, e.g., under a condition(s) associated with inflammation. In some embodiments, the genetically engineered bacteria are capable of producing kynurenine in low-oxygen conditions, in the presence of certain molecules or metabolites, in the presence of molecules or metabolites associated with inflammation or an inflammatory response, or in the presence of some other metabolite that may or may not be present in the gut, such as arabinose.

[0576] Other Indole Metabolites

[0577] In one embodiment, the genetically engineered bacteria comprise one or more gene sequence(s) which encode one or more tryptophan catabolism enzymes, which produce indole-3-carbinol, indole-3-aldehyde, 3,3′ diindolylmethane (DIM), indolo(3,2-b) carbazole (ICZ) from indole glucosinolate taken up through the diet. Non-limiting example of such gene sequence(s) are shown FIG. 41H and described elsewhere herein. In one embodiment, the genetically engineered bacteria comprise one or more gene sequence(s) which encode pne2 (myrosinase). In one embodiment, the genetically engineered bacteria comprise one or more gene sequence(s) which encode pne2from Arabidopsis thaliana.

[0578] In any of these embodiments, the genetically engineered bacteria also optionally comprise one or more gene sequence(s) comprising one or more enzymes for tryptophan production, and gene deletions/or mutations as depicted and described in FIG. 40, FIG. 44A and/or FIG. 44B and described elsewhere herein. In some embodiments, AroG and/or TrpE are replaced with feedback resistant versions to improve tryptophan production in the genetically engineered bacteria. In some embodiments, trpR and/or the tnaA gene (encoding a tryptophanase converting tryptophan into indole) are deleted to further increase levels of tryptophan produced. In some embodiments, the genetically engineered bacteria also optionally comprise one or more gene sequence(s) which encode one or more transporter(s) as described herein, through which tryptophan can be imported. Optionally, in some embodiments, the genetically engineered bacteria also optionally comprise one or more gene sequence(s) which encode an exporter as described herein, which can export tryptophan or any of its metabolites.

[0579] To improve acetate production, while maintaining high levels of Other indoles production, targeted one or more deletions can be introduced in competing metabolic arms of mixed acid fermentation to prevent the production of alternative metabolic fermentative byproducts (thereby increasing acetate production). Non-limiting examples of competing such competing metabolic arms are frdA (converts phosphoenolpyruvate to succinate), ldhA (converts pyruvate to lactate) and adhE (converts Acetyl-CoA to Ethanol). Deletions which may be introduced therefore include deletion of adhE, ldh, and frd. Thus, in certain embodiments, the genetically engineered bacteria comprise one or more Other indoles production cassette(s) and further comprise mutations and/or deletions in one or more of frdA, ldhA, and adhE.

[0580] In some embodiments, the genetically engineered bacteria comprise one or more Other indoles production cassette(s) described herein and one or more mutation(s) and/or deletion(s) in one or more genes selected from the ldhA gene, the frdA gene and the adhE gene.

[0581] In some embodiments, the genetically engineered bacteria comprise one or more gene sequence(s) encoding one or more enzymes described herein for the production of Other indoles and further comprise a mutation and/or deletion in one or more endogenous genes selected from in the ldhA gene, the frdA gene and the adhE genes. In some embodiments, the genetically engineered bacteria comprise one or more gene sequence(s) encoding one or more enzymes described herein for the production of Other indoles and further comprise a mutation and/or deletion in the endogenous ldhA gene. In some embodiments, the genetically engineered bacteria comprise one or more gene sequence(s) encoding one or more enzymes described herein for the production of Other indoles and further comprise a mutation and/or deletion in the endogenous adhE gene. In some embodiments, the genetically engineered bacteria comprise one or more gene sequence(s) encoding one or more enzymes described herein for the production of Other indoles and further comprise a mutation and/or deletion in the endogenous frdA gene. In some embodiments, the genetically engineered bacteria comprise one or more gene sequence(s) encoding one or more enzymes described herein for the production of Other indoles and further comprise a mutation and/or deletion in the endogenous ldhA and rdA genes. In some embodiments, the genetically engineered bacteria comprise one or more gene sequence(s) encoding one or more enzymes described herein for the production of Other indoles and further comprise a mutation and/or deletion in the endogenous ldhA genes and adhE genes. In some embodiments, the genetically engineered bacteria comprise one or more gene sequence(s) encoding one or more enzymes described herein for the production of Other indoles and further comprise a mutation and/or deletion in the endogenous frdA and adhE genes. In some embodiments, the genetically engineered bacteria comprise one or more gene sequence(s) encoding one or more enzymes described herein for the production of Other indoles and further comprise a mutation and/or deletion in the endogenous ldhA, the frdA, and adhE genes. In some embodiments, the genetically engineered bacteria comprise one or more gene sequence(s) encoding one or more enzymes described herein for the production of Other indoles and further comprise a mutation and/or deletion in one or more endogenous genes selected from in the ldhA gene, the frdA gene and the adhE genes.

[0582] In some embodiments, the genetically engineered bacteria produce 0% to to 2% to 4%, 4% to 6%, 6% to 8%, 8% to 10%, 10% to 12%, 12% to 14%, 14% to 16%, 16% to 18%, 18% to 20%, 20% to 25%, 25% to 30%, 30% to 35%, 35% to 40%, 40% to 45% 45% to 50%, 50% to 55%, 55% to 60%, 60% to 65%, 65% to 70% to 80%, 80% to 90%, or 90% to 100% more acetate than unmodified bacteria of the same bacterial subtype under the same conditions. In yet another embodiment, the genetically engineered bacteria produce 1.0-1.2-fold, 1.2-1.4-fold, 1.4-1.6-fold, 1.6-1.8-fold, 1.8-2-fold, or two-fold more acetate than unmodified bacteria of the same bacterial subtype under the same conditions. In yet another embodiment, the the genetically engineered bacteria produce three-fold, four-fold, five-fold, six-fold, seven-fold, eight-fold, nine-fold, ten-fold, fifteen-fold, twenty-fold, thirty-fold, forty-fold, or fifty-fold, more acetate than unmodified bacteria of the same bacterial subtype under the same conditions.

[0583] In some embodiments, the genetically engineered bacteria produce 0% to 2% to 4%, 4% to 6%, 6% to 8%, 8% to 10%, 10% to 12%, 12% to 14%, 14% to 16%, 16% to 18%, 18% to 20%, 20% to 25%, 25% to 30%, 30% to 35%, 35% to 40%, 40% to 45% 45% to 50%, 50% to 55%, 55% to 60%, 60% to 65%, 65% to 70% to 80%, 80% to 90%, or 90% to 100% more Other indoles than unmodified bacteria of the same bacterial subtype under the same conditions. In yet another embodiment, the genetically engineered bacteria produce 1.0-1.2-fold, 1.2-1.4-fold, 1.4-1.6-fold, 1.6-1.8-fold, 1.8-2-fold, or two-fold more Other indoles than unmodified bacteria of the same bacterial subtype under the same conditions. In yet another embodiment, the the genetically engineered bacteria produce three-fold, four-fold, five-fold, six-fold, seven-fold, eight-fold, nine-fold, ten-fold, fifteen-fold, twenty-fold, thirty-fold, forty-fold, or fifty-fold, more Other indoles than unmodified bacteria of the same bacterial subtype under the same conditions.

[0584] In certain situations, the need may arise to prevent and/or reduce acetate production by of an engineered or naturally occurring strain, e.g., E. coli Nissle, while maintaining high levels of Other indoles production. Without wishing to be bound by theory, one or more mutations and/or deletions in one or more gene(s) encoding in one or more enzymes described herein which function in the acetate producing metabolic arm of fermentation should reduce and/or prevent production of acetate. A non-limiting example of such an enzyme is phosphate acetyltransferase (Pta), which is the first enzyme in the metabolic arm converting acetyl-CoA to acetate. Deletion and/or mutation of the Pta gene or a gene encoding another enzyme in this metabolic arm may also allow for more acetyl-CoA to be used for Other indoles production. Additionally, one or more mutations preventing or reducing the flow through other metabolic arms of mixed acid fermentation, such as those which produce succinate, lactate, and/or ethanol can increase the production of acetyl-CoA, which is available for Other indoles synthesis. Such mutations and/or deletions, include but are not limited to mutations and/or deletions in the frdA, ldhA, and/or adhE genes.

[0585] In some embodiments, the genetically engineered bacteria comprise one or more gene sequence(s) encoding one or more enzymes described herein for the production of Other indoles and further comprise a mutation and/or deletion in the endogenous pta gene. In some embodiments, the genetically engineered bacteria comprise one or more gene sequence(s) encoding one or more enzymes described herein for the production of Other indoles and further comprise a mutation and/or deletion in the endogenous pta gene and in one or more endogenous genes selected from in the ldhA gene, the frdA gene and the adhE gene. In some embodiments, the genetically engineered bacteria comprise one or more gene sequence(s) encoding one or more enzymes described herein for the production of Other indoles and further comprise a mutation in the endogenous pta and adhE genes. In some embodiments, the genetically engineered bacteria comprise one or more gene sequence(s) encoding one or more enzymes described herein for the production of Other indoles and further comprise a mutation in the endogenous pta and ldhA genes. In some embodiments, the genetically engineered bacteria comprise one or more gene sequence(s) encoding one or more enzymes described herein for the production of Other indoles and further comprise a mutation in the endogenous pta and frdA genes. In some embodiments, the genetically engineered bacteria comprise one or more gene sequence(s) encoding one or more enzymes described herein for the production of Other indoles and further comprise a mutation and/or deletion in the endogenous pta, ldhA and frdA genes. In some embodiments, the genetically engineered bacteria comprise one or more gene sequence(s) encoding one or more enzymes described herein for the production of Other indoles and further comprise a mutation in the endogenous pta, ldhA, and adhE genes. In some embodiments, the genetically engineered bacteria comprise one or more gene sequence(s) encoding one or more enzymes described herein for the production of Other indoles and further comprise a mutation in the endogenous pta, frdA and adhE genes. In some embodiments, the genetically engineered bacteria comprise one or more gene sequence(s) encoding one or more enzyme(s) for the production of Other indoles and further comprise a mutation and/or deletion in the endogenous pta, ldhA, frdA, and adhE genes.

[0586] In some embodiments, the genetically engineered bacteria produce 0% to to 2% to 4%, 4% to 6%, 6% to 8%, 8% to 10%, 10% to 12%, 12% to 14%, 14% to 16%, 16% to 18%, 18% to 20%, 20% to 25%, 25% to 30%, 30% to 35%, 35% to 40%, 40% to 45% 45% to 50%, 50% to 55%, 55% to 60%, 60% to 65%, 65% to 70% to 80%, 80% to 90%, or 90% to 100% less acetate than unmodified bacteria of the same bacterial subtype under the same conditions. In yet another embodiment, the genetically engineered bacteria produce 1.0-1.2-fold, 1.2-1.4-fold, 1.4-1.6-fold, 1.6-1.8-fold, 1.8-2-fold, or two-fold less acetate than unmodified bacteria of the same bacterial subtype under the same conditions. In yet another embodiment, the genetically engineered bacteria produce three-fold, four-fold, five-fold, six-fold, seven-fold, eight-fold, nine-fold, ten-fold, fifteen-fold, twenty-fold, thirty-fold, forty-fold, or fifty-fold, less acetate than unmodified bacteria of the same bacterial subtype under the same conditions.

[0587] In some embodiments, the genetically engineered bacteria produce 0% to to 2% to 4%, 4% to 6%, 6% to 8%, 8% to 10%, 10% to 12%, 12% to 14%, 14% to 16%, 16% to 18%, 18% to 20%, 20% to 25%, 25% to 30%, 30% to 35%, 35% to 40%, 40% to 45% 45% to 50%, 50% to 55%, 55% to 60%, 60% to 65%, 65% to 70% to 80%, 80% to 90%, or 90% to 100% more Other indoles than unmodified bacteria of the same bacterial subtype under the same conditions. In yet another embodiment, the genetically engineered bacteria produce 1.0-1.2-fold, 1.2-1.4-fold, 1.4-1.6-fold, 1.6-1.8-fold, 1.8-2-fold, or two-fold more Other indoles than unmodified bacteria of the same bacterial subtype under the same conditions. In yet another embodiment, the genetically engineered bacteria produce three-fold, four-fold, five-fold, six-fold, seven-fold, eight-fold, nine-fold, ten-fold, fifteen-fold, twenty-fold, thirty-fold, forty-fold, or fifty-fold, more Other indoles than unmodified bacteria of the same bacterial subtype under the same conditions.

[0588] In some embodiments, the genetically engineered bacteria are capable of producing these metabolites under inducing conditions, e.g., under a condition(s) associated with inflammation. In some embodiments, the genetically engineered bacteria are capable of producing kynurenine in low-oxygen conditions, in the presence of certain molecules or metabolites, in the presence of molecules or metabolites associated with inflammation or an inflammatory response, or in the presence of some other metabolite that may or may not be present in the gut, such as arabinose.

[0589] Tryptophan Catabolic Pathway Enzymes

[0590] Table 11A and Table 11B comprise polypeptide and polynucleotide sequences of such enzymes which are encoded by the genetically engineered bacteria of the disclosure.

TABLE 11A
Tryptophan Pathway Catabolic Enzymes

| Description | Sequence |
|---|---|
| TDC: Tryptophan | MGSIDSTNVAMSNSPVGEFKPLEAEEFRKQAHRMVDFIADYY |
| decarboxylase from | KNVETYPVLSEVEPGYLRKRIPETAPYLPEPLDDIMKDIQKDII |
| Catharanthus roseus | PGMTNWMSPNFYAFFPATVSSAAFLGEMLSTALNSVGFTWV |
| SEQ ID NO: 141 | SSPAATELEMIVMDWLAQILKLPKSFMFSGTGGGVIQNTTSES |
| | ILCTIIAARERALEKLGPDSIGKLVCYGSDQTHTMFPKTCKLA |
| | GIYPNNIRLIPTTVETDFGISPQVLRKMVEDDVAAGYVPLFLC |
| | ATLGTTSTTATDPVDSLSEIANEFGIWIHVDAAYAGSACICPEF |
| | RHYLDGIERVDSLSLSPHKWLLAYLDCTCLWVKQPHLLLRAL |
| | TTNPEYLKNKQSDLDKVVDFKNWQIATGRKFRSLKLWLILRS |
| | YGVVNLQSHIRSDVAMGKMFEEWVRSDSRFEIVVPRNFSLVC |
| | FRLKPDVSSLHVEEVNKKLLDMLNSTGRVYMTHTIVGGIYML |
| | RLAVGSSLTEEHHVRRVWDLIQKLTDDLLKEA |
| TDC: Tryptophan | MKFWRKYTQQEMDEKITESLEKTLNYDNTKTIGIPGTKLDDT |
| decarboxylase from | VFYDDHSFVKHSPYLRTFIQNPNHIGCHTYDKADILFGGTFDIE |
| Clostridium | RELIQLLAIDVLNGNDEEFDGYVTQGGTEANIQAMWVYRNY |
| sporogenes | FKKERKAKHEEIAIITSADTHYSAYKGSDLLNIDIIKVPVDFYS |
| SEQ ID NO: 142 | RKIQENTLDSIVKEAKEIGKKYFIVISNMGTTMFGSVDDPDLY |
| | ANIFDKYNLEYKIHVDGAFGGFIYPIDNKECKTDFSNKNVSSIT |
| | LDGHKMLQAPYGTGIFVSRKNLIHNTLTKEATYIENLDVTLSG |
| | SRSGSNAVAIWMVLASYGPYGWMEKINKLRNRTKWLCKQL |
| | NDMRIKYYKEDSMNIVTIEEQYVNKEIAEKYFLVPEVHNPTN |
| | NWYKIVVMEHVELDILNSLVYDLRKFNKEHLKAM |
| TYNA: Monoamine | MGSPSLYSARKTTLALAVALSFAWQAPVFAHGGEAHMVPM |
| oxidase from E. coli | DKTLKEFGADVQWDDYAQLFTLIKDGAYVKVKPGAQTAIVN |
| SEQ ID NO: 143 | GQPLALQVPVVMKDNKAWVSDTFINDVFQSGLDQTFQVEKR |
| | PHPLNALTADEIKQAVEIVKASADFKPNTRFTEISLLPPDKEAV |
| | WAFALENKPVDQPRKADVIMLDGKHIIEAVVDLQNNKLLSW |
| | QPIKDAHGMVLLDDFASVQNIINNSEEFAAAVKKRGITDAKK |
| | VITTPLTVGYFDGKDGLKQDARLLKVISYLDVGDGNYWAHPI |
| | ENLVAVVDLEQKKIVKIEEGPVVPVPMTARPFDGRDRVAPAV |
| | KPMQIIEPEGKNYTITGDMIHWRNWDFHLSMNSRVGPMISTV |
| | TYNDNGTKRKVMYEGSLGGMIVPYGDPDIGWYFKAYLDSGD |
| | YGMGTLTSPIARGKDAPSNAVLLNETIADYTGVPMEIPRAIAV |
| | FERYAGPEYKHQEMGQPNVSTERRELVVRWISTVGNYDYIFD |
| | WIFHENGTIGIDAGATGIEAVKGVKAKTMHDETAKDDTRYGT |
| | LIDHNIVGTTHQHIYNFRLDLDVDGENNSLVAMDPVVKPNTA |
| | GGPRTSTMQVNQYNIGNEQDAAQKFDPGTIRLLSNPNKENRM |
| | GNPVSYQIIPYAGGTHPVAKGAQFAPDEWIYHRLSFMDKQLW |
| | VTRYHPGERFPEGKYPNRSTHDTGLGQYSKDNESLDNTDAV |
| | VWMTTGTTHVARAEEWPIMPTEWVHTLLKPWNFFDETPTLG |
| | ALKKDK |
| AAO1: Indole-3- | MGEKAIDEDKVEAMKSSKTSLVFAINGQRFELELSSIDPSTTL |
| acetaldehyde oxidase | VDFLRNKTPFKSVKLGCGEGGCGACVVLLSKYDPLLEKVDEF |
| from Arabidopsis | TISSCLTLLCSIDGCSITTSDGLGNSRVGFHAVHERIAGFHATQ |
| thaliana | CGFCTPGMSVSMFSALLNADKSHPPPRSGFSNLTAVEAEKAV |
| SEQ ID NO: 144 | SGNLCRCTGYRPLVDACKSFAADVDIEDLGFNAFCKKGENRD |
| | EVLRRLPCYDHTSSHVCTFPEFLKKEIKNDMSLHSRKYRWSSP |
| | VSVSELQGLLEVENGLSVKLVAGNTSTGYYKEEKERKYERFI |
| | DIRKIPEFTMVRSDEKGVELGACVTISKAIEVLREEKNVSVLA |
| | KIATHMEKIANRFVRNTGTIGGNIMMAQRKQFPSDLATILVA |
| | AQATVKIMTSSSSQEQFTLEEFLQQPPLDAKSLLLSLEIPSWHS |
| | AKKNGSSEDSILLFETYRAAPRPLGNALAFLNAAFSAEVTEAL |
| | DGIVVNDCQINFGAYGTKHAHRAKKVEEFLTGKVISDEVLM |
| | EAISLLKDEIVPDKGTSNPGYRSSLAVTFLFEFFGSLTKKNAKT |
| | TNGWLNGGCKEIGFDQNVESLKPEAMLSSAQQIVENQEHSPV |
| | GKGITKAGACLQASGEAVYVDDIPAPENCLYGAFIYSTMPLA |
| | RIKGIRFKQNRVPEGVLGIITYKDIPKGGQNIGTNGFFTSDLLF |
| | AEEVTHCAGQIIAFLVADSQKHADIAANLVVIDYDTKDLKPPI |
| | LSLEEAVENFSLFEVPPPLRGYPVGDITKGMDEAEHKILGSKIS |
| | FGSQYFFYMETQTALAVPDEDNCMVVYSSTQTPEFVHQTIAG |
| | CLGVPENNVRVITRRVGGGFGGKAVKSMPVAAACALAASK |
| | MQRPVRTYVNRKTDMITTGGRHPMKVTYSVGFKSNGKITAL |
| | DVEVLLDAGLTEDISPLMPKGIQGALMKYDWGALSFNVKVC |
| | KTNTVSRTALRAPGDVQGSYIGEAIIEKVASYLSVDVDEIRKV |
| | NLHTYESLRLFHSAKAGEFSEYTLPLLWDRIDEFSGFNKRRKV |
| | VEEFNASNKWRKRGISRVPAVYAVNMRSTPGRVSVLGDGSIV |
| | VEVQGIEIGQGLWTKVKQMAAYSLGLIQCGTTSDELLKKIRVI |
| | QSDTLSMVQGSMTAGSTTSEASSEAVRICCDGLVERLLPVKT |
| | ALVEQTGGFVTWDSLISQAYQQSINMSVSSKYMPDSTGEYLN |
| | YGIAASEVEVNVLTGETTILRTDIIYDCGKSLNPAVDLGQIEGA |
| | FVQGLGFFMLEEFLMNSDGLVVTDSTWTYKIPTVDTIPRQFN |
| | VEILNSGQHKNRVLSSKASGEPPLLLAASVHCAVRAAVKEAR |
| | KQILSWNSNKQGTDMYFELPVPATMPIVKEFCGLDVVEKYLE |
| | WKIQQRKNV |
| ARO9: L-tryptophan | MTAGSAPPVDYTSLKKNFQPFLSRRVENRSLKSFWDASDISD |
| aminotransferase | DVIELAGGMPNERFFPIESMDLKISKVPFNDNPKWHNSFTTAH |
| from S. cerevisae | LDLGSPSELPIARSFQYAETKGLPPLLHFVKDFVSRINRPAFSD |
| SEQ ID NO: 145 | ETESNWDVILSGGSNDSMFKVFETICDESTTVMIEEFTFTPAM |
| | SNVEATGAKVIPIKMNLTFDRESQGIDVEYLTQLLDNWSTGP |
| | YKDLNKPRVLYTIATGQNPTGMSVPQWKREKIYQLAQRHDF |
| | LIVEDDPYGYLYFPSYNPQEPLENPYHSSDLTTERYLNDFLMK |
| | SFLTLDTDARVIRLETFSKIFAPGLRLSFIVANKFLLQKILDLAD |
| | ITTRAPSGTSQAIVYSTIKAMAESNLSSSLSMKEAMFEGWIRW |
| | IMQIASKYNHRKNLTLKALYETESYQAGQFTVMEPSAGMFIII |
| | KINWGNFDRPDDLPQQMDILDKFLLKNGVKVVLGYKMAVCP |
| | NYSKQNSDFLRLTIAYARDDDQLIEASKRIGSGIKEFFDNYKS |
| aspC: aspartate | MFENITAAPADPILGLADLFRADERPGKINLGIGVYKDETGKT |
| aminotransferase | PVLTSVKKAEQYLLENETTKNYLGIDGIPEFGRCTQELLFGKG |
| from E. coli | SALINDKRARTAQTPGGTGALRVAADFLAKNTSVKRVWVSN |
| SEQ ID NO: 146 | PSWPNHKSVFNSAGLEVREYAYYDAENHTLDFDALINSLNEA |
| | QAGDVVLFHGCCHNPTGIDPTLEQWQTLAQLSVEKGWLPLF |
| | DFAYQGFARGLEEDAEGLRAFAAMHKELIVASSYSKNFGLYN |
| | ERVGACTLVAADSETVDRAFSQMKAAIRANYSNPPAHGASV |
| | VATILSNDALRAIWEQELTDMRQRIQRMRQLFVNTLQEKGAN |
| | RDFSFIIKQNGMFSFSGLTKEQVLRLREEFGVYAVASGRVNVA |
| | GMTPDNMAPLCEAIVAVL |
| TAA1: L-tryptophan- | MVKLENSRKPEKISNKNIPMSDFVVNLDHGDPTAYEEYWRK |
| pyruvate | MGDRCTVTIRGCDLMSYFSDMTNLCWFLEPELEDAIKDLHGV |
| aminotransferase | VGNAATEDRYIVVGTGSTQLCQAAVHALSSLARSQPVSVVA |
| from Arabidopsis | AAPFYSTYVEETTYVRSGMYKWEGDAWGFDKKGPYIELVTS |
| thaliana | PNNPDGTIRETVVNRPDDDEAKVIHDFAYYWPHYTPITRRQD |
| SEQ ID NO: 147 | HDIMLFTFSKITGHAGSRIGWALVKDKEVAKKMVEYIIVNSIG |
| | VSKESQVRTAKILNVLKETCKSESESENFFKYGREMMKNRWE |
| | KLREVVKESDAFTLPKYPEAFCNYFGKSLESYPAFAWLGTKE |
| | ETDLVSELRRHKVMSRAGERCGSDKKHVRVSMLSREDVFNV |
| | FLERLANMKLIKSIDL |
| STAO: L-tryptophan | MTAPLQDSDGPDDAIGGPKQVTVIGAGIAGLVTAYELERLGH |
| oxidase from | HVQIIEGSDDIGGRIHTHRFSGAGGPGPFAEMGAMRIPAGHRL |
| streptomyces sp. TP- | TMHYIAELGLQNQVREFRTLFSDDAAYLPSSAGYLRVREAHD |
| A0274 | TLVDEFATGLPSAHYRQDTLLFGAWLDASIRAIAPRQFYDGL |
| SEQ ID NO: 148 | HNDIGVELLNLVDDIDLTPYRCGTARNRIDLHALFADHPRVR |
| | ASCPPRLERFLDDVLDETSSSIVRLKDGMDELPRRLASRIRGKI |
| | SLGQEVTGIDVHDDTVTLTVRQGLRTVTRTCDYVVCTIPFTVL |
| | RTLRLTGFDQDKLDIVHETKYWPATKIAFHCREPFWEKDGIS |
| | GGASFTGGHVRQTYYPPAEGDPALGAVLLASYTIGPDAEALA |
| | RMDEAERDALVAKELSVMHPELRRPGMVLAVAGRDWGARR |
| | WSRGAATVRWGQEAALREAERRECARPQKGLFFAGEHCSSK |
| | PAWIEGAIESAIDAAHEIEWYEPRASRVFAASRLSRSDRSA |
| ipdC: Indole-3- | MRTPYCVADYLLDRLTDCGADHLFGVPGDYNLQFLDHVIDS |
| pyruvate | PDICWVGCANELNASYAADGYARCKGFAALLTTFGVGELSA |
| decarboxylase from | MNGIAGSYAEHVPVLHIVGAPGTAAQQRGELLHHTLGDGEFR |
| Enterobacter cloacae | HFYHMSEPITVAQAVLTEQNACYEIDRVLTTMLRERRPGYLM |
| SEQ ID NO: 149 | LPADVAKKAATPPVNALTHKQAHADSACLKAFRDAAENKLA |
| | MSKRTALLADFLVLRHGLKHALQKWVKEVPMAHATMLMG |
| | KGIFDERQAGFYGTYSGSASTGAVKEAIEGADTVLCVGTRFT |
| | DTLTAGFTHQLTPAQTIEVQPHAARVGDVWFTGIPMNQAIET |
| | LVELCKQHVHAGLMSSSSGAIPFPQPDGSLTQENFWRTLQTFI |
| | RPGDIILADQGTSAFGAIDLRLPADVNFIVQPLWGSIGYTLAA |
| | AFGAQTACPNRRVIVLTGDGAAQLTIQELGSMLRDKQHPIILV |
| | LNNEGYTVERAIHGAEQRYNDIALWNWTHIPQALSLDPQSEC |
| | WRVSEAEQLADVLEKVAHHERLSLIEVMLPKADIPPLLGALT |
| | KALEACNNA |
| IAD1 : Indole-3- | MPTLNLDLPNGIKSTIQADLFINNKFVPALDGKTFATINPSTGK |
| acetaldehyde | EIGQVAEASAKDVDLAVKAAREAFETTWGENTPGDARGRLLI |
| dehydrogenase from | KLAELVEANIDELAAIESLDNGKAFSIAKSFDVAAVAANLRY |
| Ustilago maydis | YGGWADKNHGKVMEVDTKRLNYTRHEPIGVCGQIIPWNFPL |
| SEQ ID NO: 150 | LMFAWKLGPALATGNTIVLKTAEQTPLSAIKMCELIVEAGFPP |
| | GVVNVISGFGPVAGAAISQHMDIDKIAFTGSTLVGRNIMKAA |
| | ASTNLKKVTLELGGKSPNIIFKDADLDQAVRWSAFGIMFNHG |
| | QCCCAGSRVYVEESIYDAFMEKMTAHCKALQVGDPFSANTF |
| | QGPQVSQLQYDRIMEYIESGKKDANLALGGVRKGNEGYFIEP |
| | TIFTDVPHDAKIAKEEIFGPVVVVSKFKDEKDLIRIANDSIYGL |
| | AAAVFSRDISRAIETAHKLKAGTVWVNCYNQLIPQVPFGGYK |
| | ASGIGRELGEYALSNYTNIKAVHVNLSQPAPI |
| YUC2: indole-3- | MEFVTETLGKRIHDPYVEETRCLMIPGPIIVGSGPSGLATAACL |
| pyruvate | KSRDIPSLILERSTCIASLWQHKTYDRLRLHLPKDFCELPLMPF |
| monoxygenase from | PSSYPTYPTKQQFVQYLESYAEHFDLKPVFNQTVEEAKFDRR |
| Arabidopsis thaliana | CGLWRVRTTGGKKDETMEYVSRWLVVATGENAEEVMPEID |
| SEQ ID NO: 151 | GIPDFGGPILHTSSYKSGEIFSEKKILVVGCGNSGMEVCLDLCN |
| | FNALPSLVVRDSVHVLPQEMLGISTFGISTSLLKWFPVHVVDR |
| | FLLRMSRLVLGDTDRLGLVRPKLGPLERKIKCGKTPVLDVGT |
| | LAKIRSGHIKVYPELKRVMHYSAEFVDGRVDNFDAIILATGY |
| | KSNVPMWLKGVNMFSEKDGFPHKPFPNGWKGESGLYAVGF |
| | TKLGLLGAAIDAKKIAEDIEVQRHFLPLARPQHC |
| IaaM: Tryptophan 2- | MYDHFNSPSIDILYDYGPFLKKCEMTGGIGSYSAGTPTPRVAI |
| monooxygenase from | VGAGISGLVAATELLRAGVKDVVLYESRDRIGGRVWSQVFD |
| Pseudomonas | QTRPRYIAEMGAMRFPPSATGLFHYLKKFGISTSTTFPDPGVV |
| savastanoi | DTELHYRGKRYHWPAGKKPPELFRRVYEGWQSLLSEGYLLE |
| SEQ ID NO: 152 | GGSLVAPLDITAMLKSGRLEEAAIAWQGWLNVFRDCSFYNAI |
| | VCIFTGRHPPGGDRWARPEDFELFGSLGIGSGGFLPVFQAGFT |
| | EILRMVINGYQSDQRLIPDGISSLAARLADQSFDGKALRDRVC |
| | FSRVGRISREAEKIIIQTEAGEQRVFDRVIVTSSNRAMQMIHCL |
| | TDSESFLSRDVARAVRETHLTGSSKLFILTRTKFWIKNKLPTTI |
| | QSDGLVRGVYCLDYQPDEPEGHGVVLLSYTWEDDAQKMLA |
| | MPDKKTRCQVLVDDLAAIHPTFASYLLPVDGDYERYVLHHD |
| | WLTDPHSAGAFKLNYPGEDVYSQRLFFQPMTANSPNKDTGL |
| | YLAGCSCSFAGGWIEGAVQTALNSACAVLRSTGGQLSKGNPL |
| | DCINASYRY |
| iaaH: | MHEIITLESLCQALADGEIAAAELRERALDTEARLARLNCFIRE |
| Indoleacetamide | GDAVSQFGEADHAMKGTPLWGMPVSFKDNICVRGLPLTAGT |
| hydrolase from | RGMSGFVSDQDAAIVSQLRALGAVVAGKNNMHELSFGVTSI |
| Pseudomonas | NPHWGTVGNPVAPGYCAGGSSGGSAAAVASGIVPLSVGTDT |
| savastanoi | GGSIRIPAAFCGITGFRPTTGRWSTAGIIPVSHTKDCVGLLTRT |
| SEQ ID NO: 153 | AGDAGFLYGLLSGKQQSFPLSRTAPCRIGLPVSMWSDLDGEV |
| | ERACVNALSLLRKTGFEFIEIDDADIVELNQTLTFTVPLYEFFA |
| | DLAQSLLSLGWKHGIHHIFAQVDDANVKGIINHHLGEGAIKP |
| | AHYLSSLQNGELLKRKMDELFARHNIELLGYPTVPCRVPHLD |
| | HADRPEFFSQAIRNTDLASNAMLPSITIPVGPEGRLPVGLSFDA |
| | LRGRDALLLSRVSAIEQVLGFVRKVLPHTT |
| TrpDH: Tryptophan | MLLFETVREMGHEQVLFCHSKNPEIKAIIAIHDTTLGPAMGAT |
| dehydrogenase from | RILPYINEEAALKDALRLSRGMTYKAACANIPAGGGKAVIIAN |
| Nostoc punctiforme | PENKTDDLLRAYGRFVDSLNGRFITGQDVNITPDDVRTISQET |
| NIES-2108 | KYVVGVSEKSGGPAPITSLGVFLGIKAAVESRWQSKRLDGMK |
| SEQ ID NO: 154 | VAVQGLGNVGKNLCRHLHEHDVQLFVSDVDPIKAEEVKRLF |
| | GATVVEPTEIYSLDVDIFAPCALGGILNSHTIPFLQASIIAGAAN |
| | NQLENEQLHSQMLAKKGILYSPDYVINAGGLINVYNEMIGYD |
| | EEKAFKQVHNIYDTLLAIFEIAKEQGVTTNDAARRLAEDRINN |
| | SKRSKSKAIAA |
| CYP79B2: | MNTFTSNSSDLTTTATETSSFSTLYLLSTLQAFVAITLVMLLKK |
| tryptophan N- | LMTDPNKKKPYLPPGPTGWPIIGMIPTMLKSRPVFRWLHSIMK |
| monooxygenase from | QLNTEIACVKLGNTHVITVTCPKIAREILKQQDALFASRPLTY |
| Arabidopsis thaliana | AQKILSNGYKTCVITPFGDQFKKMRKVVMTELVCPARHRWL |
| SEQ ID NO: 155 | HQKRSEENDHLTAWVYNMVKNSGSVDFRFMTRHYCGNAIK |
| | KLMFGTRTFSKNTAPDGGPTVEDVEHMEAMFEALGFTFAFCI |
| | SDYLPMLTGLDLNGHEKIMRESSAIMDKYHDPIIDERIKMWR |
| | EGKRTQIEDFLDIFISIKDEQGNPLLTADEIKPTIKELVMAAPDN |
| | PSNAVEWAMAEMVNKPEILRKAMEEIDRVVGKERLVQESDIP |
| | KLNYVKAILREAFRLHPVAAFNLPHVALSDTTVAGYHIPKGS |
| | QVLLSRYGLGRNPKVWADPLCFKPERHLNECSEVTLTENDLR |
| | FISFSTGKRGCAAPALGTALTTMMLARLLQGFTWKLPENETR |
| | VELMESSHDMFLAKPLVMVGDLRLPEHLYPTVK |
| CYP79B3: | MDTLASNSSDLTTKSSLGMSSFTNMYLLTTLQALAALCFLMI |
| tryptophan N- | LNKIKSSSRNKKLHPLPPGPTGFPIVGMIPAMLKNRPVFRWLH |
| monooxygenase from | SLMKELNTEIACVRLGNTHVIPVTCPKIAREIFKQQDALFASRP |
| Arabidopsis thaliana | LTYAQKILSNGYKTCVITPFGEQFKKMRKVIMTEIVCPARHR |
| SEQ ID NO: 156 | WLHDNRAEETDHLTAWLYNMVKNSEPVDLRFVTRHYCGNA |
| | IKRLMFGTRTFSEKTEADGGPTLEDIEHMDAMFEGLGFTFAFC |
| | ISDYLPMLTGLDLNGHEKIMRESSAIMDKYHDPIIDERIKMWR |
| | EGKRTQIEDFLDIFISIKDEAGQPLLTADEIKPTIKELVMAAPDN |
| | PSNAVEWAIAEMINKPEILHKAMEEIDRVVGKERFVQESDIPK |
| | LNYVKAIIREAFRLHPVAAFNLPHVALSDTTVAGYHIPKGSQV |
| | LLSRYGLGRNPKVWSDPLSFKPERHLNECSEVTLTENDLRFIS |
| | FSTGKRGCAAPALGTAITTMMLARLLQGFKWKLAGSETRVE |
| | LMESSHDMFLSKPLVLVGELRLSEDLYPMVK |
| CYP71A13: | MSNIQEMEMILSISLCLTTLITLLLLRRFLKRTATKVNLPPSPW |
| indoleacetaldoxime | RLPVIGNLHQLSLHPHRSLRSLSLRYGPLMLLHFGRVPILVVSS |
| dehydratase from | GEAAQEVLKTHDHKFANRPRSKAVHGLMNGGRDVVFAPYG |
| Arabidopis thaliana | EYWRQMKSVCILNLLTNKMVESFEKVREDEVNAMIEKLEKA |
| SEQ ID NO: 157 | SSSSSSENLSELFITLPSDVTSRVALGRKHSEDETARDLKKRVR |
| | QIMELLGEFPIGEYVPILAWIDGIRGFNNKIKEVSRGFSDLMDK |
| | VVQEHLEASNDKADFVDILLSIEKDKNSGFQVQRNDIKFMILD |
| | MFIGGTSTTSTLLEWTMTELIRSPKSMKKLQDEIRSTIRPHGSY |
| | IKEKEVENMKYLKAVIKEVLRLHPSLPMILPRLLSEDVKVKGY |
| | NIAAGTEVIINAWAIQRDTAIWGPDAEEFKPERHLDSGLDYHG |
| | KNLNYIPFGSGRRICPGINLALGLAEVTVANLVGRFDWRVEA |
| | GPNGDQPDLTEAIGIDVCRKFPLIAFPSSVV |
| PEN2: myrosinase | MAHLQRTFPTEMSKGRASFPKGFLFGTASSSYQYEGAVNEGA |
| from Arabidopsis | RGQSVWDHFSNRFPHRISDSSDGNVAVDFYHRYKEDIKRMK |
| thaliana | DINMDSFRLSIAWPRVLPYGKRDRGVSEEGIKFYNDVIDELLA |
| SEQ ID NO: 158 | NEITPLVTIFHWDIPQDLEDEYGGFLSEQIIDDFRDYASLCFERF |
| | GDRVSLWCTMNEPWVYSVAGYDTGRKAPGRCSKYVNGASV |
| | AGMSGYEAYIVSHNMLLAHAEAVEVFRKCDHIKNGQIGIAHN |
| | PLWYEPYDPSDPDDVEGCNRAMDFMLGWHQHPTACGDYPE |
| | TMKKSVGDRLPSFTPEQSKKLIGSCDYVGINYYSSLFVKSIKH |
| | VDPTQPTWRTDQGVDWMKTNIDGKQIAKQGGSEWSFTYPTG |
| | LRNILKYVKKTYGNPPILITENGYGEVAEQSQSLYMYNPSIDT |
| | ERLEYIEGHIHAIHQAIHEDGVRVEGYYVWSLLDNFEWNSGY |
| | GVRYGLYYIDYKDGLRRYPKMSALWLKEFLRFDQEDDSSTS |
| | KKEEKKESYGKQLLHSVQDSQFVHSIKDSGALPAVLGSLFVV |
| | SATVGTSLFFKGANN |
| Nit1: Nitrilase from | MSSTKDMSTVQNATPFNGVAPSTTVRVTIVQSSTVYNDTPATI |
| Arabidopsis thaliana | DKAEKYIVEAASKGAELVLFPEGFIGGYPRGFRFGLAVGVHN |
| SEQ ID NO: 159 | EEGRDEFRKYHASAIHVPGPEVARLADVARKNHVYLVMGAI |
| | EKEGYTLYCTVLFFSPQGQFLGKHRKLMPTSLERCIWGQGDG |
| | STIPVYDTPIGKLGAAICWENRMPLYRTALYAKGIELYCAPTA |
| | DGSKEWQSSMLHIAIEGGCFVLSACQFCQRKHFPDHPDYLFT |
| | DWYDDKEHDSIVSQGGSVIISPLGQVLAGPNFESEGLVTADID |
| | LGDIARAKLYFDSVGHYSRPDVLHLTVNEHPRKSVTFVTKVE |
| | KAEDDSNK |
| IDO1: indoleamine | MAHAMENSWTISKEYHIDEEVGFALPNPQENLPDFYNDWMFI |
| 2,3-dioxygenase from | AKHLPDLIESGQLRERVEKLNMLSIDHLTDHKSQRLARLVLG |
| homo sapiens | CITMAYVWGKGHGDVRKVLPRNIAVPYCQLSKKLELPPILVY |
| SEQ ID NO: 160 | ADCVLANWKKKDPNKPLTYENMDVLFSFRDGDCSKGFFLVS |
| | LLVEIAAASAIKVIPTVFKAMQMQERDTLLKALLEIASCLEKA |
| | LQVFHQIHDHVNPKAFFSVLRIYLSGWKGNPQLSDGLVYEGF |
| | WEDPKEFAGGSAGQSSVFQCFDVLLGIQQTAGGGHAAQFLQ |
| | DMRRYMPPAHRNFLCSLESNPSVREFVLSKGDAGLREAYDA |
| | CVKALVSLRSYHLQIVTKYILIPASQQPKENKTSEDPSKLEAK |
| | GTGGTDLMNFLKTVRSTTEKSLLKEG |
| TDO2: tryptophan | MSGCPFLGNNFGYTFKKLPVEGSEEDKSQTGVNRASKGGLIY |
| 2,3-dioxygenase from | GNYLHLEKVLNAQELQSETKGNKIHDEHLFIITHQAYELWFK |
| homo sapiens | QILWELDSVREIFQNGHVRDERNMLKVVSRMHRVSVILKLLV |
| SEQ ID NO: 161 | QQFSILETMTALDFNDFREYLSPASGFQSLQFRLLENKIGVLQ |
| | NMRVPYNRRHYRDNFKGEENELLLKSEQEKTLLELVEAWLE |
| | RTPGLEPHGFNFWGKLEKNITRGLEEEFIRIQAKEESEEKEEQV |
| | AEFQKQKEVLLSLFDEKRHEHLLSKGERRLSYRALQGALMIY |
| | FYREEPRFQVPFQLLTSLMDIDSLMTKWRYNHVCMVHRMLG |
| | SKAGTGGSSGYHYLRSTVSDRYKVFVDLFNLSTYLIPRHWIPK |
| | MNPTIHKFLYTAEYCDSSYFSSDESD |
| BNA2: indoleamine | MNNTSITGPQVLHRTKMRPLPVLEKYCISPHHGFLDDRLPLTR |
| 2,3-dioxygenase from | LSSKKYMKWEEIVADLPSLLQEDNKVRSVIDGLDVLDLDETIL |
| S. cerevisiae | GDVRELRRAYSILGFMAHAYIWASGTPRDVLPECIARPLLETA |
| SEQ ID NO: 162 | HILGVPPLATYSSLVLWNFKVTDECKKTETGCLDLENITTINTF |
| | TGTVDESWFYLVSVRFEKIGSACLNHGLQILRAIRSGDKGDA |
| | NVIDGLEGLAATIERLSKALMEMELKCEPNVFYFKIRPFLAGW |
| | TNMSHMGLPQGVRYGAEGQYRIFSGGSNAQSSLIQTLDILLG |
| | VKHTANAAHSSQGDSKINYLDEMKKYMPREHREFLYHLESV |
| | CNIREYVSRNASNRALQEAYGRCISMLKIFRDNHIQIVTKYIIL |
| | PSNSKQHGSNKPNVLSPIEPNTKASGCLGHKVASSKTIGTGGT |
| | RLMPFLKQCRDETVATADIKNEDKN |
| Afmid: Kynurenine | MAFPSLSAGQNPWRNLSSEELEKQYSPSRWVIHTKPEEVVGN |
| formamidase from | FVQIGSQATQKARATRRNQLDVPYGDGEGEKLDIYFPDEDSK |
| mouse | AFPLFLFLHGGYWQSGSKDDSAFMVNPLTAQGIVVVIVAYDI |
| SEQ ID NO: 163 | APKGTLDQMVDQVTRSVVFLQRRYPSNEGIYLCGHSAGAHL |
| | AAMVLLARWTKHGVTPNLQGFLLVSGIYDLEPLIATSQNDPL |
| | RMTLEDAQRNSPQRHLDVVPAQPVAPACPVLVLVGQHDSPE |
| | FHRQSKEFYETLLRVGWKASFQQLRGVDHFDIIENLTREDDV |
| | LTQIILKTVFQKL |
| BNA3: kynurenine-- | MKQRFIRQFTNLMSTSRPKVVANKYFTSNTAKDVWSLTNEA |
| oxoglutarate | AAKAANNSKNQGRELINLGQGFFSYSPPQFAIKEAQKALDIPM |
| transaminase from S. | VNQYSPTRGRPSLINSLIKLYSPIYNTELKAENVTVTTGANEGI |
| cerevisae | LSCLMGLLNAGDEVIVFEPFFDQYIPNIELCGGKVVYVPINPPK |
| SEQ ID NO: 164 | ELDQRNTRGEEWTIDFEQFEKAITSKTKAVIINTPHNPIGKVFT |
| | REELTTLGNICVKHNVVIISDEVYEHLYFTDSFTRIATLSPEIGQ |
| | LTLTVGSAGKSFAATGWRIGWVLSLNAELLSYAAKAHTRICF |
| | ASPSPLQEACANSINDALKIGYFEKMRQEYINKFKIFTSIFDEL |
| | GLPYTAPEGTYFVLVDFSKVKIPEDYPYPEEILNKGKDFRISH |
| | WLINELGVVAIPPTEFYIKEHEKAAENLLRFAVCKDDAYLEN |
| | AVERLKLLKDYL |
| GOT2: Aspartate | MALLHSGRVLPGIAAAFHPGLAAAASARASSWWTHVEMGPP |
| aminotransferase, | DPILGVTEAFKRDTNSKKMNLGVGAYRDDNGKPYVLPSVRK |
| mitochondrial from | AEAQIAAKNLDKEYLPIGGLAEFCKASAELALGENSEVLKSG |
| homo sapiens | RFVTVQTISGTGALRIGASFLQRFFKFSRDVFLPKPTWGNHTPI |
| SEQ ID NO: 165 | FRDAGMQLQGYRYYDPKTCGFDFTGAVEDISKIPEQSVLLLH |
| | ACAHNPTGVDPRPEQWKEIATVVKKRNLFAFFDMAYQGFAS |
| | GDGDKDAWAVRHFIEQGINVCLCQSYAKNMGLYGERVGAFT |
| | MVCKDADEAKRVESQLKILIRPMYSNPPLNGARIAAAILNTPD |
| | LRKQWLQEVKVMADRIIGMRTQLVSNLKKEGSTHNWQHITD |
| | QIGMFCFTGLKPEQVERLIKEFSIYMTKDGRISVAGVTSSNVG |
| | YLAHAIHQVTK |
| AADAT: | MNYARFITAASAARNPSPIRTMTDILSRGPKSMISLAGGLPNP |
| Kynurenine/alpha- | NMFPFKTAVITVENGKTIQFGEEMMKRALQYSPSAGIPELLSW |
| aminoadipate | LKQLQIKLHNPPTIHYPPSQGQMDLCVTSGSQQGLCKVFEMII |
| aminotransferase, | NPGDNVLLDEPAYSGTLQSLHPLGCNIINVASDESGIVPDSLR |
| mitochondrial | DILSRWKPEDAKNPQKNTPKFLYTVPNGNNPTGNSLTSERKK |
| SEQ ID NO: 166 | EIYELARKYDFLIIEDDPYYFLQFNKFRVPTFLSMDVDGRVIRA |
| | DSFSKIISSGLRIGFLTGPKPLIERVILHIQVSTLHPSTFNQLMIS |
| | QLLHEWGEEGFMAHVDRVIDFYSNQKDAILAAADKWLTGLA |
| | EWHVPAAGMFLWIKVKGINDVKELIEEKAVKMGVLMLPGN |
| | AFYVDSSAPSPYLRASFSSASPEQMDVAFQVLAQLIKESL |
| CCLB1: Kynurenine- | MAKQLQARRLDGIDYNPWVEFVKLASEHDVVNLGQGFPDFP |
| -oxoglutarate | PPDFAVEAFQHAVSGDFMLNQYTKTFGYPPLTKILASFFGELL |
| transaminase 1 from | GQEIDPLRNVLVTVGGYGALFTAFQALVDEGDEVIIIEPFFDC |
| homo sapiens | YEPMTMMAGGRPVFVSLKPGPIQNGELGSSSNWQLDPMELA |
| SEQ ID NO: 167 | GKFTSRTKALVLNTPNNPLGKVFSREELELVASLCQQHDVVCI |
| | TDEVYQWMVYDGHQHISIASLPGMWERTLTIGSAGKTFSATG |
| | WKVGWVLGPDHIMKHLRTVHQNSVFHCPTQSQAAVAESFER |
| | EQLLFRQPSSYFVQFPQAMQRCRDHMIRSLQSVGLLPIIPQGS |
| | YFLITDISDFKRKMPDLPGAVDEPYDRRFVKWMIKNKGLVAI |
| | PVSIFYSVPHQKHFDHYIRFCFVKDEATLQAMDEKLRKWKVE |
| L | |
| CCLB2: kynurenine-- | MFLAQRSLCSLSGRAKFLKTISSSKILGFSTSAKMSLKFTNAKR |
| oxoglutarate | IEGLDSNVWIEFTKLAADPSVVNLGQGFPDISPPTYVKEELSKI |
| | AAIDSLNQYTRGFGHPSLVKALSYLYEKLYQKQIDSNKEILVT |
| transaminase 3 from | VGAYGSLFNTIQALIDEGDEVILIVPFYDCYEPMVRMAGATPV |
| homo sapiens | FIPLRSKPVYGKRWSSSDWTLDPQELESKFNSKTKAIILNTPHN |
| SEQ ID NO: 168 | PLGKVYNREELQVIADLCIKYDTLCISDEVYEWLVYSGNKHL |
| | KIATFPGMWERTITIGSAGKTFSVTGWKLGWSIGPNHLIKHLQ |
| | TVQQNTIYTCATPLQEALAQAFWIDIKRMDDPECYFNSLPKEL |
| | EVKRDRMVRLLESVGLKPIVPDGGYFIIADVSLLDPDLSDMK |
| | NNEPYDYKFVKWMTKHKKLSAIPVSAFCNSETKSQFEKFVRF |
| | CFIKKDSTLDAAEEIIKAWSVQKS |
| TnaA: tryptophanase | MENFKHLPEPFRIRVIEPVKRTTRAYREEAIIKSGMNPFLLDSE |
| from E. coli | DVFIDLLTDSGTGAVTQSMQAAMMRGDEAYSGSRSYYALAE |
| SEQ ID NO: 140 | SVKNIFGYQYTIPTHQGRGAEQIYIPVLIKKREQEKGLDRSKM |
| | VAFSNYFFDTTQGHSQINGCTVRNVYIKEAFDTGVRYDFKGN |
| | FDLEGLERGIEEVGPNNVPYIVATITSNSAGGQPVSLANLKAM |
| | YSIAKKYDIPVVMDSARFAENAYFIKQREAEYKDWTIEQITRE |
| | TYKYADMLAMSAKKDAMVPMGGLLCMKDDSFFDVYTECRT |
| | LCVVQEGFPTYGGLEGGAMERLAVGLYDGMNLDWLAYRIA |
| | QVQYLVDGLEEIGVVCQQAGGHAAFVDAGKLLPHIPADQFP |
| | AQALACELYKVAGIRAVEIGSFLLGRDPKTGKQLPCPAELLRL |
| | TIPRATYTQTHMDFIIEAFKHVKENAANIKGLTFTYEPKVLRH |
| | FTAKLKEV |
| Trp | MTATTISIETVPQAPAAGTKTNGTSGKYNPRTYLSDRAKVTEI |
| aminotransferase | DGSDAGRPNPDTFPFNSITLNLKPPLGLPESSNNMPVSITIEDPD |
| (EC 2.6.1.27); | LATALQYAPSAGIPKLREWLADLQAHVHERPRGDYAISVGSG |
| tryptophan | SQDLMFKGFQAVLNPGDPVLLETPMYSGVLPALRILKADYAE |
| aminotransferase | VDVDDQGLSAKNLEKVLSEWPADKKRPRVLYTSPIGSNPSGC |
| +Cryptococcus | SASKERKLEVLKVCKKYDVLIFEDDPYYYLAQELIPSYFALEK |
| deuterogattii R265 | QVYPEGGHVVRFDSFSKLLSAGMRLGFATGPKEILHAIDVSTA |
| SEQ ID NO: 169 | GANLHTSAVSQGVALRLMQYWGIEGFLAHGRAVAKLYTERR |
| | AQFEATAHKYLDGLATWVSPVAGMFLWIDLRPAGIEDSYELI |
| | RHEALAKGVLGVPGMAFYPTGRKSSHVRVSFSIVDLEDESDL |
| | GFQRLAEAIKDKRKALGLA |
| Tryptophan | MSQVIKKKRNTFMIGTEYILNSTQLEEAIKSFVHDFCAEKHEIH |
| Decarboxylase (EC | DQPVVVEAKEHQEDKIKQIKIPEKGRPVNEVVSEMMNEVYRY |
| 4.1.1.28) Chain A, | RGDANHPRFFSFVPGPASSVSWLGDIMTSAYNIHAGGSKLAP |
| Ruminococcus | MVNCIEQEVLKWLAKQVGFTENPGGVFVSGGSMANITALTA |
| Gnavus | ARDNKLTDINLHLGTAYISDQTHSSVAKGLRIIGITDSRIRRIPT |
| SEQ ID NO: 170 | NSHFQMDTTKLEEAIETDKKSGYIPFVVIGTAGTTNTGSIDPLT |
| | EISALCKKHDMWFHIDGAYGASVLLSPKYKSLLTGTGLADSIS |
| | WDAHKWLFQTYGCAMVLVKDIRNLFHSFHVNPEYLKDLEN |
| | DIDNVNTWDIGMELTRPARGLKLWLTLQVLGSDLIGSAIEHG |
| | FQLAVWAEEALNPKKDWEIVSPAQMAMINFRYAPKDLTKEE |
| | QDILNEKISHRILESGYAAIFTTVLNGKTVLRICAIHPEATQED |
| | MQHTIDLLDQYGREIYTEMKKa |

TABLE 11B
Tryptophan Pathway Catabolic Enzymes

| Description | Sequence |
|---|---|
| Trp | ATGACGGCAACTACAATTTCTATTGAGAGCCGTACCTC |
| aminotransferase | AGGCCCCGGCGGCGGGGACCAAAACTAATGGGACTT |
| (EC 2.6.1.27); | CAGGAAAATACAACCCCCGCACTTACCTGTCCGACC |
| tryptophan | GCGCCAAAGTCACTGAGATTGATGGATCTGACGCCG |
| aminotransferase | GTCGCCCCAATCCCGATACTTTCCCATTTAACTCGAT |
| [Cryptococcusdeuterogattii | TACCTTAAATTTGAAACCACCTTTAGGCTTGCCCGAG |
| R265], codon optimized for | AGTTCAAATAACATGCCGGTCTCTATCACGATTGAA |
| expression in E. coli | GACCCCGATTTAGCGACGGCCTTACAATATGCACCT |
| | AGCGCCGGTATTCCTAAGCTGCGCGAATGGCTGGCT |
| | GACTTACAAGCTCACGTTCATGAGCGCCCCCGTGGC |
| | GATTATGCCATCTCGGTCGGGTCGGGGTCACAGGAT |
| | TTGATGTTTAAGGGCTTCCAAGCTGTCTTGAATCCAG |
| | GTGATCCAGTCCTTCTGGAAACCCCAATGTATTCAGG |
| | TGTTCTGCCAGCGCTGCGCATTCTGAAGGCGGATTAT |
| | GCAGAAGTTGATGTAGACGACCAGGGGTTATCTGCT |
| | AAAAACCTTGAAAAAGTTTTATCAGAGTGGCCCGCA |
| | GATAAGAAGCGTCCTCGTGTCCTGTATACGTCGCCA |
| | ATCGGCTCCAATCCTTCCGGATGTTCAGCATCCAAGG |
| | AACGCAAGTTAGAGGTACTGAAAGTCTGTAAGAAGT |
| | ACGATGTGCTGATCTTCGAAGACGATCCGTATTATTA |
| | CCTTGCTCAAGAGCTTATTCCATCCTATTTTGCGTTG |
| | GAAAAACAAGTTTATCCGGAGGGTGGGCACGTTGTA |
| | CGCTTTGACTCATTTAGTAAATTGCTTTCTGCTGGGA |
| | TGCGCTTGGGATTTGCTACAGGGCCGAAGGAAATTC |
| | TTCATGCGATTGACGTCAGTACAGCAGGCGCAAATT |
| | TACATACTTCAGCGGTCTCTCAAGGTGTCGCTCTTCG |
| | CCTGATGCAGTATTGGGGGATCGAGGGATTCCTTGC |
| | ACATGGCCGCGCGGTGGCCAAACTTTACACGGAGCG |
| | CCGCGCTCAGTTCGAGGCAACCGCACATAAGTACCT |
| | GGACGGGCTGGCCACTTGGGTATCTCCCGTAGCGGG |
| | AATGTTTTTATGGATCGATCTTCGTCCAGCAGGAATC |
| | GAAGATTCTTACGAATTAATTCGCCATGAAGCATTA |
| | GCCAAAGGCGTTTTAGGCGTTCCAGGGATGGCGTTTT |
| | ATCCGACAGGCCGTAAGTCTTCCCATGTTCGTGTCAG |
| | TTTCAGTATCGTCGACCTGGAAGACGAATCTGACCTT |
| | GGTTTTCAACGCCTGGCTGAAGCTATTAAGGATAAA |
| | CGCAAGGCTTTAGGGCTGGCT |
| Tryptophan | ATGAGTCAAGTGATTAAGAAGAAACGTAACACCTTT |
| Decarboxylase (EC | ATGATCGGAACGGAGTACATTCTTAACAGTACACAA |
| 4.1.1.28) Chain A, | TTGGAGGAAGCGATTAAATCATTCGTACATGATTTCT |
| Ruminococcus | GCGCAGAGAAGCATGAGATCCATGATCAACCTGTGG |
| Gnavus Tryptophan | TAGTAGAAGCTAAAGAACATCAGGAGGACAAAATC |
| Decarboxylase Rum | AAACAAATCAAAATCCCGGAAAAGGGACGTCCTGTA |
| gna_01526 (alpha- | AATGAAGTCGTTTCTGAGATGATGAATGAAGTGTAT |
| fmt); codon | CGCTACCGCGGAGACGCCAACCATCCTCGCTTTTTTT |
| optimized for the | CTTTTGTGCCCGGACCTGCAAGCAGTGTGTCGTGGTT |
| expression in | GGGGGATATTATGACGTCCGCCTACAATATTCATGCT |
| E. coli | GGAGGCTCAAAGCTGGCACCGATGGTTAACTGCATT |
| SEQ ID NO: 172 | GAGCAGGAAGTTCTGAAGTGGTTAGCAAAGCAAGTG |
| | GGGTTCACAGAAAATCCAGGTGGCGTATTTGTGTCG |
| | GGCGGTTCAATGGCGAATATTACGGCACTTACTGCG |
| | GCTCGTGACAATAAACTGACCGACATTAACCTTCATT |
| | TGGGAACTGCTTATATTAGTGACCAGACTCATAGTTC |
| | AGTTGCGAAAGGATTACGCATTATTGGAATCACTGA |
| | CAGTCGCATCCGTCGCATTCCCACTAACTCCCACTTC |
| | CAGATGGATACCACCAAGCTGGAGGAAGCCATCGAG |
| | ACCGACAAGAAGTCTGGCTACATTCCGTTCGTCGTTA |
| | TCGGAACAGCAGGTACCACCAACACTGGITCGATTG |
| | ACCCCCTGACAGAAATCTCTGCGTTATGTAAGAAGC |
| | ATGACATGTGGTTTCATATCGACGGAGCGTATGGAG |
| | CTAGTGTTCTGCTGTCACCTAAGTACAAGAGCCTTCT |
| | TACCGGAACCGGCTTGGCTGACAGTATTTCGTGGGA |
| | TGCTCATAAATGGTTGTTCCAAACGTACGGCTGTGCA |
| | ATGGTACTTGTCAAAGATATCCGTAATTTATTCCACT |
| | CTTTTCATGTGAATCCCGAGTATCTTAAGGATCTGGA |
| | AAACGACATCGATAACGTTAATACATGGGACATCGG |
| | CATGGAGCTGACGCGCCCTGCACGCGGTCTTAAATT |
| | GTGGCTTACTTTACAGGTCCTTGGATCTGACTTGATT |
| | GGGAGTGCCATTGAACACGGTTTCCAGCTGGCAGTT |
| | TGGGCTGAGGAAGCATTGAATCCAAAGAAAGACTGG |
| | GAGATCGTTTCTCCAGCTCAGATGGCTATGATTAATT |
| | TCCGTTATGCCCCTAAGGATTTAACCAAAGAGGAAC |
| | AGGATATTCTGAATGAAAAGATCTCCCACCGCATTTT |
| | AGAGAGCGGATACGCTGCAATTTTCACTACTGTATTA |
| | AACGGCAAGACCGTTTTACGCATCTGTGCAATTCACC |
| | CGGAGGCAACTCAAGAGGATATGCAACACACAATCG |
| | ACTTATTAGACCAATACGGTCGTGAAATCTATACCG |
| | AGATGAAGAAAGCG |
| Tdc (tdc from C. roseus) | ATGGGTTCTATTGACTCGACGAATGTGGCCATGTCT |
| SEQ ID NO: 260 | AATTCTCCTGTTGGCGAGTTTAAGCCCCTTGAAGCA |
| | GAAGAGTTCCGTAAACAGGCACACCGCATGGTGGA |
| | TTTTATTGCGGATTATTACAAGAACGTAGAAACATA |
| | CCCGGTCCTTTCCGAGGTTGAACCCGGCTATCTGCG |
| | CAAACGTATTCCCGAAACCGCACCATACCTGCCGG |
| | AGCCACTTGATGATATTATGAAGGATATTCAAAAG |
| | GACATTATCCCCGGAATGACGAACTGGATGTCCCCG |
| | AACTTTTACGCCTTCTTCCCGGCCACAGTTAGCTCA |
| | GCAGCTTTCTTGGGGGAAATGCTTTCAACGGCCCTT |
| | AACAGCGTAGGATTTACCTGGGTCAGTTCCCCGGCA |
| | GCGACTGAATTAGAGATGATCGTTATGGATTGGCTT |
| | GCGCAAATTTTGAAACTTCCAAAAAGCTTTATGTTC |
| | TCCGGAACCGGGGGTGGTGTCATCCAAAACACTAC |
| | GTCAGAGTCGATCTTGTGCACTATTATCGCGGCCCG |
| | TGAACGCGCCTTGGAAAAATTGGGCCCTGATTCAAT |
| | TGGTAAGCTTGTCTGCTATGGGTCCGATCAAACGCA |
| | CACAATGTTTCCGAAAACCTGTAAGTTAGCAGGAAT |
| | TTATCCGAATAATATCCGCCTTATCCCTACCACGGT |
| | AGAAACCGACTTTGGCATCTCACCGCAGGTACTTCG |
| | CAAGATGGTCGAAGACGACGTCGCTGCGGGGTACG |
| | TTCCCTTATTTTTGTGTGCCACCTTGGGAACGACATC |
| | AACTACGGCAACAGATCCTGTAGATTCGCTGTCCGA |
| | AATCGCAAACGAGTTTGGTATCTGGATTCATGTCGA |
| | CGCCGCATATGCTGGATCGGCTTGCATCTGCCCAGA |
| | ATTTCGTCACTACCTTGATGGCATCGAACGTGTGGA |
| | TTCCTTATCGCTGTCTCCCCACAAATGGCTTTTAGCA |
| | TATCTGGATTGCACGTGCTTGTGGGTAAAACAACCT |
| | CACCTGCTGCTTCGCGCTTTAACGACTAATCCCGAA |
| | TACTTGAAGAATAAACAGAGTGATTTAGATAAGGT |
| | CGTGGATTTTAAGAACTGGCAGATCGCAACAGGAC |
| | GTAAGTTCCGCTCTTTAAAACTTTGGTTAATTCTGC |
| | GTTCCTACGGGGTAGTTAACCTGCAAAGTCATATCC |
| | GTAGTGATGTAGCGATGGGGAAGATGTTTGAGGAA |
| | TGGGTCCGTTCCGATAGCCGCTTTGAAATCGTCGTG |
| | CCACGTAATTTTTCGCTTGTATGCTTTCGCTTGAAAC |
| | CGGATGTATCTAGTTTACATGTCGAGGAGGTCAACA |
| | AGAAGTTGTTGGATATGCTTAACTCCACCGGTCGCG |
| | TATATATGACGCATACAATTGTTGGCGGAATCTATA |
| | TGTTACGTTTGGCTGTAGGTAGCAGCTTGACAGAGG |
| | AACATCACGTGCGCCGCGTTTGGGACTTGATCCAGA |
| | AGCTTACGGACGACCTGCTTAAAGAGGCGTGA |
| Tdc (tdc from | ATGAAATTTTGGCGCAAGTATACGCAACAGGAGAT |
| Clostridium | GGATGAGAAAATCACAGAATCGCTTGAGAAGACAT |
| sporogenes) | TAAATTACGATAACACGAAAACCATCGGCATCCCA |
| SEQ ID NO: 262 | GGTACTAAGCTGGATGATACTGTATTTTATGACGAT |
| | CACTCCTTCGTTAAGCACTCTCCCTATTTACGTACGT |
| | TCATCCAAAACCCTAATCACATTGGTTGTCACACGT |
| | ACGATAAAGCAGACATCTTGTTTGGCGGCACGTTTG |
| | ACATCGAACGCGAACTGATTCAGCTTTTGGCCATCG |
| | ATGTCTTAAACGGAAATGATGAGGAATTCGATGGA |
| | TATGTGACACAGGGGGGAACCGAGGCGAATATTCA |
| | GGCAATGTGGGTTTATCGTAACTATTTCAAAAAAGA |
| | ACGTAAAGCAAAACATGAGGAAATCGCAATCATCA |
| | CGAGCGCGGATACCCATTACAGTGCATATAAGGGG |
| | AGCGACTTGCTGAACATTGATATTATCAAGGTCCCA |
| | GTAGACTTCTATTCGCGTAAGATCCAGGAGAACAC |
| | GTTAGACTCGATTGTCAAGGAGGCGAAGGAAATTG |
| | GAAAGAAGTACTTCATTGTCATCTCAAACATGGGTA |
| | CGACTATGTTTGGCAGTGTAGACGACCCTGATCTTT |
| | ATGCTAACATTTTTGATAAGTATAACTTAGAATACA |
| | AAATCCACGTCGATGGAGCTTTTGGGGGTTTCATTT |
| | ATCCTATCGATAATAAGGAGTGCAAAACAGATTTCT |
| | CGAACAAGAACGTCTCATCCATCACGCTTGACGGTC |
| | ACAAAATGCTTCAAGCCCCCTATGGGACTGGTATCT |
| | TCGTGTCACGTAAGAACTTGATCCATAACACCCTGA |
| | CAAAGGAAGCAACGTATATTGAAAACCTGGACGTT |
| | ACCCTGAGTGGGTCCCGCTCCGGATCCAACGCCGTT |
| | GCGATCTGGATGGTTTTAGCCTCTTATGGCCCCTAC |
| | GGGTGGATGGAGAAGATTAACAAGTTGCGCAATCG |
| | CACTAAGTGGCTTTGCAAGCAGCTTAACGACATGCG |
| | CATCAAATACTATAAGGAGGATAGCATGAATATCG |
| | TCACGATTGAAGAGCAATACGTAAATAAAGAGATT |
| | GCAGAGAAATACTTCCTTGTGCCTGAAGTACACAAT |
| | CCTACCAACAATTGGTACAAGATTGTAGTCATGGAA |
| | CATGTTGAACTTGACATCTTGAACTCCCTTGTTTATG |
| | ATTTACGTAAATTCAACAAGGAGCACCTGAAGGCA |
| | ATGTGA |
| ipdC | ATGCGTACACCCTACTGTGTCGCCGATTATCTTTTA |
| SEQ ID NO: 265 | GATCGTCTGACGGACTGCGGGGCCGATCACCTGTTT |
| | GGCGTACCGGGCGATTACAACTTGCAGTTTCTGGAC |
| | CACGTCATTGACTCACCAGATATCTGCTGGGTAGGG |
| | TGTGCGAACGAGCTTAACGCGAGCTACGCTGCTGA |
| | CGGATATGCGCGTTGTAAAGGCTTTGCTGCACTTCT |
| | TACTACCTTCGGGGTCGGTGAGTTATCGGCGATGAA |
| | CGGTATCGCAGGCTCGTACGCTGAGCACGTCCCGGT |
| | ATTACACATTGTGGGAGCTCCGGGTACCGCAGCTCA |
| | ACAGCGCGGAGAACTGTTACACCACACGCTGGGCG |
| | ACGGAGAATTCCGCCACTTTTACCATATGTCCGAGC |
| | CAATTACTGTAGCCCAGGCTGTACTTACAGAGCAAA |
| | ATGCCTGTTACGAGATCGACCGTGTTTTGACCACGA |
| | TGCTTCGCGAGCGCCGTCCCGGGTATTTGATGCTGC |
| | CAGCCGATGTTGCCAAAAAAGCTGCGACGCCCCCA |
| | GTGAATGCCCTGACGCATAAACAAGCTCATGCCGA |
| | TTCCGCCTGTTTAAAGGCTTTTCGCGATGCAGCTGA |
| | AAATAAATTAGCCATGTCGAAACGCACCGCCTTGTT |
| | GGCGGACTTTCTGGTCCTGCGCCATGGCCTTAAACA |
| | CGCCCTTCAGAAATGGGTCAAAGAAGTCCCGATGG |
| | CCCACGCTACGATGCTTATGGGTAAGGGGATTTTTG |
| | ATGAACGTCAAGCGGGATTTTATGGAACTTATTCCG |
| | GTTCGGCGAGTACGGGGGCGGTAAAGGAAGCGATT |
| | GAGGGAGCCGACACAGTTCTTTGCGTGGGGACACG |
| | TTTCACCGATACACTGACCGCTGGATTCACACACCA |
| | ACTTACTCCGGCACAAACGATTGAGGTGCAACCCC |
| | ATGCGGCTCGCGTGGGGGATGTATGGTTTACGGGC |
| | ATTCCAATGAATCAAGCCATTGAGACTCTTGTCGAG |
| | CTGTGCAAACAGCACGTCCACGCAGGACTGATGAG |
| | TTCGAGCTCTGGGGCGATTCCTTTTCCACAACCAGA |
| | TGGTAGTTTAACTCAAGAAAACTTCTGGCGCACATT |
| | GCAAACCTTTATCCGCCCAGGTGATATCATCTTAGC |
| | AGACCAGGGTACTTCAGCCTTTGGAGCAATTGACCT |
| | GCGCTTACCAGCAGACGTGAACTTTATTGTGCAGCC |
| | GCTGTGGGGGTCTATTGGTTATACTTTAGCTGCGGC |
| | CTTCGGAGCGCAGACAGCGTGTCCAAACCGTCGTGT |
| | GATCGTATTGACAGGAGATGGAGCAGCGCAGTTGA |
| | CCATTCAGGAGTTAGGCTCGATGTTACGCGATAAGC |
| | AGCACCCCATTATCCTGGTCCTGAACAATGAGGGGT |
| | ATACAGTTGAACGCGCCATTCATGGTGCGGAACAA |
| | CGCTACAATGACATCGCTTTATGGAATTGGACGCAC |
| | ATCCCCCAAGCCTTATCGTTAGATCCCCAATCGGAA |
| | TGTTGGCGTGTGTCTGAAGCAGAGCAACTGGCTGAT |
| | GTTCTGGAAAAAGTTGCTCATCATGAACGCCTGTCG |
| | TTGATCGAGGTAATGTTGCCCAAGGCCGATATCCCT |
| | CCGTTACTGGGAGCCTTGACCAAGGCTTTAGAAGCC |
| | TGCAACAACGCTTAA |
| Iad1 | ATGCCCACCTTGAACTTGGACTTACCCAACGGTATT |
| SEQ ID NO: 266 | AAGAGCACGATTCAGGCAGACCTTTTCATCAATAAT |
| | AAGTTTGTGCCGGCGCTTGATGGGAAAACGTTCGCA |
| | ACTATTAATCCGTCTACGGGGAAAGAGATCGGACA |
| | GGTGGCAGAGGCTTCGGCGAAGGATGTGGATCTTG |
| | CAGTTAAGGCCGCGCGTGAGGCGTTTGAAACTACTT |
| | GGGGGGAAAACACGCCAGGTGATGCTCGTGGCCGT |
| | TTACTGATTAAGCTTGCTGAGTTGGTGGAAGCGAAT |
| | ATTGATGAGTTAGCGGCAATTGAATCACTGGACAAT |
| | GGGAAAGCGTTCTCTATTGCTAAGTCATTCGACGTA |
| | GCTGCTGTGGCCGCAAACTTACGTTACTACGGCGGT |
| | TGGGCTGATAAAAACCACGGTAAAGTCATGGAGGT |
| | AGACACAAAGCGCCTGAACTATACCCGCCACGAGC |
| | CGATCGGGGTTTGCGGACAAATCATTCCGTGGAATT |
| | TCCCGCTTTTGATGTTTGCATGGAAGCTGGGTCCCG |
| | CTTTAGCCACAGGGAACACAATTGTGTTAAAGACTG |
| | CCGAGCAGACTCCCTTAAGTGCTATCAAGATGTGTG |
| | AATTAATCGTAGAAGCCGGCTTTCCGCCCGGAGTAG |
| | TTAATGTGATCTCGGGATTCGGACCGGTGGCGGGG |
| | GCCGCGATCTCGCAACACATGGACATCGATAAGAT |
| | TGCCTTTACAGGATCGACATTGGTTGGCCGCAACAT |
| | TATGAAGGCAGCTGCGTCGACTAACTTAAAAAAGG |
| | TTACACTTGAGTTAGGAGGAAAATCCCCGAATATCA |
| | TTTTCAAAGATGCCGACCTTGACCAAGCTGTTCGCT |
| | GGAGCGCCTTCGGTATCATGTTTAACCACGGACAAT |
| | GCTGCTGCGCTGGATCGCGCGTATATGTGGAAGAAT |
| | CCATCTATGACGCCTTCATGGAAAAAATGACTGCGC |
| | ATTGTAAGGCGCTTCAAGTTGGAGATCCTTTCAGCG |
| | CGAACACCTTCCAAGGACCACAAGTCTCGCAGTTAC |
| | AATACGACCGTATCATGGAATACATCGAATCAGGG |
| | AAAAAAGATGCAAATCTTGCTTTAGGCGGCGTTCGC |
| | AAAGGGAATGAGGGGTATTTCATTGAGCCAACTAT |
| | TTTTACAGACGTGCCGCACGACGCGAAGATTGCCA |
| | AAGAGGAGATCTTCGGTCCAGTGGTTGTTGTGTCGA |
| | AATTTAAGGACGAAAAAGATCTGATCCGTATCGCA |
| | AATGATTCTATTTATGGTTTAGCTGCGGCAGTCTTTT |
| | CCCGCGACATCAGCCGCGCGATCGAGACAGCACAC |
| | AAACTGAAAGCAGGCACGGTCTGGGTCAACTGCTA |
| | TAATCAGCTTATTCCGCAGGTGCCATTCGGAGGGTA |
| | TAAGGCTTCCGGTATCGGCCGTGAGTTGGGGGAAT |
| | ATGCCTTGTCTAATTACACAAATATCAAGGCCGTCC |
| | ACGTTAACCTTTCTCAACCGGCGCCCATTTGA |
| fldA | ATGGAAAACAACACCAATATGTTCTCTGGAGTGAA |
| SEQ ID NO: 276 | GGTGATCGAACTGGCCAACTTTATCGCTGCTCCGGC |
| | GGCAGGTCGCTTCTTTGCTGATGGGGGAGCAGAAG |
| | TAATTAAGATCGAATCTCCAGCAGGCGACCCGCTGC |
| | GCTACACGGCCCCATCAGAAGGACGCCCGCTTTCTC |
| | AAGAGGAAAACACAACGTATGATTTGGAAAACGCG |
| | AATAAGAAAGCAATTGTTCTGAACTTAAAATCGGA |
| | AAAAGGAAAGAAAATTCTTCACGAGATGCTTGCTG |
| | AGGCAGACATCTTGTTAACAAATTGGCGCACGAAA |
| | GCGTTAGTCAAACAGGGGTTAGATTACGAAACACT |
| | GAAAGAGAAGTATCCAAAATTGGTATTTGCACAGA |
| | TTACAGGATACGGGGAGAAAGGACCCGACAAAGAC |
| | CTGCCTGGTTTCGACTACACGGCGTTTTTCGCCCGC |
| | GGAGGAGTCTCCGGTACATTATATGAAAAAGGAAC |
| | TGTCCCTCCTAATGTGGTACCGGGTCTGGGTGACCA |
| | CCAGGCAGGAATGTTCTTAGCTGCCGGTATGGCTGG |
| | TGCGTTGTATAAGGCCAAAACCACCGGACAAGGCG |
| | ACAAAGTCACCGTTAGTCTGATGCATAGCGCAATGT |
| | ACGGCCTGGGAATCATGATTCAGGCAGCCCAGTAC |
| | AAGGACCATGGGCTGGTGTACCCGATCAACCGTAA |
| | TGAAACGCCTAATCCTTTCATCGTTTCATACAAGTC |
| | CAAAGATGATTACTTTGTCCAAGTTTGCATGCCTCC |
| | CTATGATGTGTTTTATGATCGCTTTATGACGGCCTTA |
| | GGACGTGAAGACTTGGTAGGTGACGAACGCTACAA |
| | TAAGATCGAGAACTTGAAGGATGGTCGCGCAAAAG |
| | AAGTCTATTCCATCATCGAACAACAAATGGTAACG |
| | AAGACGAAGGACGAATGGGACAAGATTTTTCGTGA |
| | TGCAGACATTCCATTCGCTATTGCCCAAACGTGGGA |
| | AGATCTTTTAGAAGACGAGCAGGCATGGGCCAACG |
| | ACTACCTGTATAAAATGAAGTATCCCACAGGCAAC |
| | GAACGTGCCCTGGTACGTTTACCTGTGTTCTTCAAA |
| | GAAGCTGGACTTCCTGAATACAACCAGTCGCCACA |
| | GATTGCTGAGAATACCGTGGAAGTGTTAAAGGAGA |
| | TGGGATATACCGAGCAAGAAATTGAGGAGCTTGAG |
| | AAAGACAAAGACATCATGGTACGTAAAGAGAAATG |
| | A |
| fldB | ATGTCAGACCGCAACAAAGAAGTGAAAGAAAAGA |
| SEQ ID NO: 277 | AGGCTAAACACTATCTGCGCGAGATCACAGCTAAA |
| | CACTACAAGGAAGCGTTAGAGGCTAAAGAGCGTGG |
| | GGAGAAAGTGGGTTGGTGTGCCTCTAACTTCCCCCA |
| | AGAGATTGCAACCACGTTGGGTGTAAAGGTTGTTTA |
| | TCCCGAAAACCACGCCGCCGCCGTAGCGGCACGTG |
| | GCAATGGGCAAAATATGTGCGAACACGCGGAGGCT |
| | ATGGGATTCAGTAATGATGTGTGTGGATATGCACGT |
| | GTAAATTTAGCCGTAATGGACATCGGCCATAGTGA |
| | AGATCAACCTATTCCAATGCCTGATTTCGTTCTGTG |
| | CTGTAATAATATCTGCAATCAGATGATTAAATGGTA |
| | TGAACACATTGCAAAAACGTTGGATATTCCTATGAT |
| | CCTTATCGATATTCCATATAATACTGAGAACACGGT |
| | GTCTCAGGACCGCATTAAGTACATCCGCGCCCAGTT |
| | CGATGACGCTATCAAGCAACTGGAAGAAATCACTG |
| | GCAAAAAGTGGGACGAGAATAAATTCGAAGAAGTG |
| | ATGAAGATTTCGCAAGAATCGGCCAAGCAATGGTT |
| | ACGCGCCGCGAGCTACGCGAAATACAAACCATCAC |
| | CGTTTTCGGGCTTTGACCTTTTTAATCACATGGCTGT |
| | AGCCGTTTGTGCTCGCGGCACCCAGGAAGCCGCCG |
| | ATGCATTCAAAATGTTAGCAGATGAATATGAAGAG |
| | AACGTTAAGACAGGAAAGTCTACTTATCGCGGCGA |
| | GGAGAAGCAGCGTATCTTGTTCGAGGGCATCGCTTG |
| | TTGGCCTTATCTGCGCCACAAGTTGACGAAACTGAG |
| | TGAATATGGAATGAACGTCACAGCTACGGTGTACG |
| | CCGAAGCTTTTGGGGTTATTTACGAAAACATGGATG |
| | AACTGATGGCCGCTTACAATAAAGTGCCTAACTCAA |
| | TCTCCTTCGAGAACGCGCTGAAGATGCGTCTTAATG |
| | CCGTTACAAGCACCAATACAGAAGGGGCTGTTATC |
| | CACATTAATCGCAGTTGTAAGCTGTGGTCAGGATTC |
| | TTATACGAACTGGCCCGTCGTTTGGAAAAGGAGAC |
| | GGGGATCCCTGTTGTTTCGTTCGACGGAGATCAAGC |
| | GGATCCCCGTAACTTCTCCGAGGCTCAATATGACAC |
| | TCGCATCCAAGGTTTAAATGAGGTGATGGTCGCGA |
| | AAAAAGAAGCAGAGTGA |
| fldC | ATGTCGAATAGTGACAAGTTTTTTAACGACTTCAAG |
| SEQ ID NO: 278 | GACATTGTGGAAAACCCAAAGAAGTATATCATGAA |
| | GCATATGGAACAAACGGGACAAAAAGCCATCGGTT |
| | GCATGCCTTTATACACCCCAGAAGAGCTTGTCTTAG |
| | CGGCGGGTATGTTTCCTGTTGAGTATGGGGCTCGA |
| | ATACTGAGTTGTCAAAAGCCAAGACCTACTTTCCGG |
| | CTTTTATCTGTTCTATCTTGCAAACTACTTTAGAAAA |
| | CGCATTGAATGGGGAGTATGACATGCTGTCTGGTAT |
| | GATGATCACAAACTATTGCGATTCGCTGAAATGTAT |
| | GGGACAAAACTTCAAACTTACAGTGGAAAATATCG |
| | AATTCATCCCGGTTACGGTTCCACAAAACCGCAAGA |
| | TGGAGGCGGGTAAAGAATTTCTGAAATCCCAGTAT |
| | AAAATGAATATCGAACAACTGGAAAAAATCTCAGG |
| | GAATAAGATCACTGACGAGAGCTTGGAGAAGGCTA |
| | TTGAAATTTACGATGAGCACCGTAAAGTCATGAAC |
| | GATTTCTCTATGCTTGCGTCCAAGTACCCTGGTATC |
| | ATTACGCCAACGAAACGTAACTACGTGATGAAGTC |
| | AGCGTATTATATGGACAAGAAAGAACATACAGAGA |
| | AGGTACGTCAGTTGATGGATGAAATCAAGGCCATT |
| | GAGCCTAAACCATTCGAAGGAAAACGCGTGATTAC |
| | CACTGGGATCATTGCAGATTCGGAGGACCTTTTGAA |
| | AATCTTGGAGGAGAATAACATTGCTATCGTGGGAG |
| | ATGATATTGCACACGAGTCTCGCCAATACCGCACTT |
| | TGACCCCGGAGGCCAACACACCTATGGACCGTCTTG |
| | CTGAACAATTTGCGAACCGCGAGTGTTCGACGTTGT |
| | ATGACCCTGAAAAAAAACGTGGACAGTATATTGTC |
| | GAGATGGCAAAAGAGCGTAAGGCCGACGGAATCAT |
| | CTTCTTCATGACAAAATTCTGCGATCCCGAAGAATA |
| | CGATTACCCTCAGATGAAAAAAGACTTCGAAGAAG |
| | CCGGTATTCCCCACGTTCTGATTGAGACAGACATGC |
| | AAATGAAGAACTACGAACAAGCTCGCACCGCTATT |
| | CAAGCATTTTCAGAAACCCTTTG |
| Acu1 | ATGCGTGCTGTCTTAATCGAGAAGTCAGATGACACC |
| SEQ ID NO: 279 | CAGAGTGTTTCAGTTACGGAGTTGGCTGAAGACCA |
| | ATTACCCGAAGGTGACGTCCTTGTGGATGTCGCGTA |
| | CAGCACATTGAATTACAAGGATGCTCTTGCGATTAC |
| | TGGAAAAGCACCCGTTGTACGCCGTTTTCCTATGGT |
| | CCCCGGAATTGACTTTACTGGGACTGTCGCACAGAG |
| | TTCCCATGCTGATTTCAAGCCAGGCGACCGCGTAAT |
| | TCTGAACGGATGGGGAGTTGGTGAGAAACACTGGG |
| | GCGGTCTTGCAGAACGCGCACGCGTACGTGGGGAC |
| | TGGCTTGTCCCGTTGCCAGCCCCCTTAGACTTGCGC |
| | CAGGCTGCAATGATTGGCACTGCGGGGTACACAGC |
| | TATGCTGTGCGTGCTTGCCCTTGAGCGCCATGGAGT |
| | CGTACCTGGGAACGGCGAGATTGTCGTCTCAGGCG |
| | CAGCAGGAGGGGTAGGTTCTGTAGCAACCACACTG |
| | TTAGCAGCCAAAGGCTACGAAGTGGCCGCCGTGAC |
| | CGGGCGCGCAAGCGAGGCCGAATATTTACGCGGAT |
| | TAGGCGCCGCGTCGGTCATTGATCGCAATGAATTAA |
| | CGGGGAAGGTGCGTCCATTAGGGCAGGAACGCTGG |
| | GCAGGAGGAATCGATGTAGCAGGATCAACCGTACT |
| | TGCTAATATGTTGAGCATGATGAAATACCGTGGCGT |
| | GGTGGCGGCCTGTGGCCTGGCGGCTGGAATGGACT |
| | TGCCCGCGTCTGTCGCCCCTTTTATTCTGCGTGGTAT |
| | GACTTTGGCAGGGGTAGATTCAGTCATGTGCCCCAA |
| | AACTGATCGTCTGGCTGCTTGGGCACGCCTGGCATC |
| | CGACCTGGACCCTGCAAAGCTGGAAGAGATGACAA |
| | CTGAATTACCGTTCTCTGAGGTGATTGAAACGGCTC |
| | CGAAGTTCTTGGATGGAACAGTGCGTGGGCGTATTG |
| | TCATTCCGGTAACACCTTGA |
| fldH1 | ATGAAAATCTTGGCATACTGCGTCCGCCCAGACGA |
| SEQ ID NO: 280 | GGTAGACTCCTTTAAGAAATTTAGTGAAAAGTACG |
| | GGCATACAGTTGATCTTATTCCAGACTCTTTTGGAC |
| | CTAATGTCGCTCATTTGGCGAAGGGTTACGATGGGA |
| | TTTCTATTCTGGGCAACGACACGTGTAACCGTGAGG |
| | CTGGCAACCCGTACAGCCGGAGTGAACAACATTGA |
| | CTTCGATGCAGCAAAGGAGTTCGGTATTAACGTGGC |
| | TAATGTTCCCGCATATTCCCCCAACTCGGTCAGCGA |
| | ATTTACCATTGGATTGGCATTAAGTCTGACGCGTAA |
| | GATTCCATTTGCCCTGAAACGCGTGGAACTGAACAA |
| | TTTTGCGCTTGGCGGCCTTATTGGTGTGGAATTGCG |
| | TAACTTAACTTTAGGAGTCATCGGTACTGGTCGCAT |
| | CGGATTGAAAGTGATTGAGGGCTTCTCTGGGTTTGG |
| | AATGAAAAAAATGATCGGTTATGACATTTTTGAAA |
| | ATGAAGAAGCAAAGAAGTACATCGAATACAAATCA |
| | TTAGACGAAGTTTTTAAAGAGGCTGATATTATCACT |
| | CTGCATGCGCCTCTGACAGACGACAACTATCATATG |
| | ATTGGTAAAGAATCCATTGCTAAAATGAAGGATGG |
| | GGTATTTATTATCAACGCAGCGCGTGGAGCCTTAAT |
| | CGATAGTGAGGCCCTGATTGAAGGGTTAAAATCGG |
| | GGAAGATTGCGGGCGCGGCTCTGGATAGCTATGAG |
| | TATGAGCAAGGTGTCTTTCACAACAATAAGATGAAT |
| | GAAATTATGCAGGATGATACCTTGGAACGTCTGAA |
| | ATCTTTTCCCAACGTCGTGATCACGCCGCATTTGGG |
| | TTTTTATACTGATGAGGCGGTTTCCAATATGGTAGA |
| | GATCACACTGATGAACCTTCAGGAATTCGAGTTGAA |
| | AGGAACCTGTAAGAACCAGCGTGTTTGTAAATGA |
| FldD | ATGTTCTTTACGGAGCAACACGAACTTATTCGCAAA |
| SEQ ID NO: 282 | CTGGCGCGTGACTTTGCCGAACAGGAAATCGAGCC |
| | TATCGCAGACGAAGTAGATAAAACCGCAGAGTTCC |
| | CAAAAGAAATCGTGAAGAAGATGGCTCAAAATGGA |
| | TTTTTCGGCATTAAAATGCCTAAAGAATACGGAGGG |
| | GCGGGTGCGGATAACCGCGCTTATGTCACTATTATG |
| | GAGGAAATTTCACGTGCTTCCGGGGTAGCGGGTATC |
| | TACCTGAGCTCGCCGAACAGTTTGTTAGGAACTCCC |
| | TTCTTATTGGTCGGAACCGATGAGCAAAAAGAAAA |
| | GTACCTTAAGCCTATGATCCGCGGCGAGAAGACTCT |
| | GGCGTTCGCCCTGACAGAGCCTGGTGCTGGCTCTGA |
| | TGCGGGTGCGTTGGCTACTACTGCCCGTGAAGAGG |
| | GCGACTATTATATCTTAAATGGCCGCAAGACGTTTA |
| | TTACAGGGGCTCCTATTAGCGACAATATTATTGTGT |
| | TCGCAAAAACCGATATGAGCAAAGGGACCAAAGGT |
| | ATCACCACTTTCATTGTGGACTCAAAGCAGGAAGG |
| | GGTAAGTTTTGGTAAGCCAGAGGACAAAATGGGAA |
| | TGATTGGTTGTCCGACAAGCGACATCATCTTGGAAA |
| | ACGTTAAAGTTCATAAGTCCGACATCTTGGGAGAA |
| | GTCAATAAGGGGTTTATTACCGCGATGAAAACACTT |
| | TCCGTTGGTCGTATCGGAGTGGCGTCACAGGCGCTT |
| | GGAATTGCACAGGCCGCCGTAGATGAGGCGGTAAA |
| | GTACGCCAAGCAACGTAAACAATTCAATCGCCCAA |
| | TCGCGAAATTTCAGGCCATTCAATTTAAACTTGCCA |
| | ATATGGAGACTAAATTAAATGCCGCTAAACTTCTTG |
| | TTTATAACGCAGCGTACAAAATGGATTGTGGAGAA |
| | AAAGCCGACAAGGAAGCCTCTATGGCTAAATACTT |
| | TGCTGCTGAATCAGCGATCCAAATCGTTAACGACGC |
| | GCTGCAAATCCATGGCGGGTATGGCTATATCAAAG |
| | ACTACAAGATTGAACGTTTGTACCGCGATGTGCGTG |
| | TGATCGCTATTTATGAGGGCACTTCCGAGGTCCAAC |
| | AGATGGTTATCGCGTCCAATCTGCTGAAGTAA |

[0591] In some embodiments, the genetically engineered bacteria comprise one or more nucleic acid sequence of Table 11B or a functional fragment thereof. In some embodiments, the genetically engineered bacteria comprise a nucleic acid sequence that, but for the redundancy of the genetic code, encodes the same polypeptide as listed in Table 11A or a functional fragment thereof. In some embodiments, genetically engineered bacteria comprise a nucleic acid sequence that is at least about 80%, at least about 85%, at least about 90%, at least about 95%, or at least about 99% homologous to the DNA sequence of one or more nucleic acid sequence of Table 11B or a functional fragment thereof, or a nucleic acid sequence that, but for the redundancy of the genetic code, encodes the same polypeptide the polypeptide sequences listed in Table 11A or a functional fragment thereof.

[0592] In one embodiment, the Tryptophan Decarboxylase gene encodes a polypeptide which has at least about 80% identity with the entire sequence of SEQ ID NO: 141. In another embodiment, the Tryptophan Decarboxylase gene encodes a polypeptide which has at least about 85% identity with the entire sequence of SEQ ID NO: 141. In one embodiment, the Tryptophan Decarboxylase gene encodes a polypeptide which has at least about 90% identity with the entire sequence of SEQ ID NO: 141. In one embodiment, the Tryptophan Decarboxylase gene encodes a polypeptide which has at least about 95% identity with the entire sequence of SEQ ID NO: 141. In another embodiment, the Tryptophan Decarboxylase gene encodes a polypeptide which has at least about 96%, 97%, 98%, or 99% identity with the entire sequence of SEQ ID NO: 141. Accordingly, in one embodiment, the Tryptophan Decarboxylase gene encodes a polypeptide which has at least about 80%, 81%, 82%, 83%, 84%, 85%, 86%, 87%, 88%, 89%, 90%, 91%, 92%, 93%, 94%, 95%, 96%, 97%, 98%, or 99% identity with the entire sequence of SEQ ID NO: 141. In another embodiment, the Tryptophan Decarboxylase gene encodes a polypeptide which comprises the sequence of SEQ ID NO: 141. In yet another embodiment the Tryptophan Decarboxylase gene encodes a polypeptide which consists of the sequence of SEQ ID NO: 141.

[0593] In one embodiment, the Indole-3-pyruvate decarboxylase gene encodes a polypeptide which has at least about 80% identity with the entire sequence of SEQ ID NO: 149. In another embodiment, the Indole-3-pyruvate decarboxylase gene encodes a polypeptide which has at least about 85% identity with the entire sequence of SEQ ID NO: 149. In one embodiment, the Indole-3-pyruvate decarboxylase gene encodes a polypeptide which has at least about 90% identity with the entire sequence of SEQ ID NO: 149. In one embodiment, the Indole-3-pyruvate decarboxylase gene encodes a polypeptide which has at least about 95% identity with the entire sequence of SEQ ID NO: 149. In another embodiment, the Indole-3-pyruvate decarboxylase gene encodes a polypeptide which has at least about 96%, 97%, 98%, or 99% identity with the entire sequence of SEQ ID NO: 149. Accordingly, in one embodiment, the Indole-3-pyruvate decarboxylase gene encodes a polypeptide which has at least about 80%, 81%, 82%, 83%, 84%, 85%, 86%, 87%, 88%, 89%, 90%, 91%, 92%, 93%, 94%, 95%, 96%, 97%, 98%, or 99% identity with the entire sequence of SEQ ID NO: 149. In another embodiment, the Indole-3-pyruvate decarboxylase gene encodes a polypeptide which comprises the sequence of SEQ ID NO: 149. In yet another embodiment the Indole-3-pyruvate decarboxylase gene encodes a polypeptide which consists of the sequence of SEQ ID NO: 149.

[0594] In one embodiment, the Indole-3-acetaldehyde dehydrogenase gene encodes a polypeptide which has at least about 80% identity with the entire sequence of SEQ ID NO: 150. In another embodiment, the Indole-3-acetaldehyde dehydrogenase gene encodes a polypeptide which has at least about 85% identity with the entire sequence of SEQ ID NO: 150. In one embodiment, the Indole-3-acetaldehyde dehydrogenase gene encodes a polypeptide which has at least about 90% identity with the entire sequence of SEQ ID NO: 150. In one embodiment, the Indole-3-acetaldehyde dehydrogenase gene encodes a polypeptide which has at least about 95% identity with the entire sequence of SEQ ID NO: 150. In another embodiment, the Indole-3-acetaldehyde dehydrogenase gene encodes a polypeptide which has at least about 96%, 97%, 98%, or 99% identity with the entire sequence of SEQ ID NO: 150. Accordingly, in one embodiment, the Indole-3-acetaldehyde dehydrogenase gene encodes a polypeptide which has at least about 80%, 81%, 82%, 83%, 84%, 85%, 86%, 87%, 88%, 89%, 90%, 91%, 92%, 93%, 94%, 95%, 96%, 97%, 98%, or 99% identity with the entire sequence of SEQ ID NO: 150. In another embodiment, the Indole-3-acetaldehyde dehydrogenase gene encodes a polypeptide which comprises the sequence of SEQ ID NO: 150. In yet another embodiment the Indole-3-acetaldehyde dehydrogenase gene encodes a polypeptide which consists of the sequence of SEQ ID NO: 150.

[0595] In one embodiment, the Indole-3-acetaldehyde dehydrogenase gene encodes a polypeptide which has at least about 80% identity with the entire sequence of SEQ ID NO: 154. In another embodiment, the Indole-3-acetaldehyde dehydrogenase gene encodes a polypeptide which has at least about 85% identity with the entire sequence of SEQ ID NO: 154. In one embodiment, the Indole-3-acetaldehyde dehydrogenase gene encodes a polypeptide which has at least about 90% identity with the entire sequence of SEQ ID NO: 154. In one embodiment, the Indole-3-acetaldehyde dehydrogenase gene encodes a polypeptide which has at least about 95% identity with the entire sequence of SEQ ID NO: 154. In another embodiment, the Indole-3-acetaldehyde dehydrogenase gene encodes a polypeptide which has at least about 96%, 97%, 98%, or 99% identity with the entire sequence of SEQ ID NO: 154. Accordingly, in one embodiment, the Indole-3-acetaldehyde dehydrogenase gene encodes a polypeptide which has at least about 80%, 81%, 82%, 83%, 84%, 85%, 86%, 87%, 88%, 89%, 90%, 91%, 92%, 93%, 94%, 95%, 96%, 97%, 98%, or 99% identity with the entire sequence of SEQ ID NO: 154. In another embodiment, the Indole-3-acetaldehyde dehydrogenase gene encodes a polypeptide which comprises the sequence of SEQ ID NO: 154. In yet another embodiment the Indole-3-acetaldehyde dehydrogenase gene encodes a polypeptide which consists of the sequence of SEQ ID NO: 154.

[0596] In one embodiment, genetically engineered bacteria comprise one or more gene sequence(s) which encode one or more polypeptide(s) which has at least about 80% identity with the entire sequence of one or more sequence(s) of Table 11A. In another embodiment, the one or more gene sequence(s) which encode one or more polypeptide(s) which has at least about 85% identity with the entire sequence of one or more sequence(s) of Table 11A. In one embodiment, the one or more gene sequence(s) which encode one or more polypeptide(s) which has at least about 90% identity with the entire sequence of one or more sequence(s) of Table 11A. In one embodiment, the one or more gene sequence(s) which encode one or more polypeptide(s) which has at least about 95% identity with the entire sequence of one or more sequence(s) of Table 11A. In another embodiment, the one or more gene sequence(s) which encode one or more polypeptide(s) which has at least about 96%, 97%, 98%, or 99% identity with the entire sequence of one or more sequence(s) of Table 11A. Accordingly, in one embodiment, the one or more gene sequence(s) which encode one or more polypeptide(s) which has at least about 80%, 81%, 82%, 83%, 84%, 85%, 86%, 87%, 88%, 89%, 90%, 91%, 92%, 93%, 94%, 95%, 96%, 97%, 98%, or 99% identity with the entire sequence of one or more sequence(s) of Table 11A. In another embodiment, the one or more gene sequence(s) which encode one or more polypeptide(s) which comprises the entire sequence of one or more sequence(s) of Table 11A.

[0597] In some embodiments, the genetically engineered bacteria comprise a gene cassette for the production of tryptamine from tryptophan. In some embodiments, the genetically engineered bacteria take up tryptophan through an endogenous or exogenous transporter as described above herein. In some embodiments the bacteria further produce tryptamine from tryptophan. In some embodiments, the genetically engineered bacteria optionally comprise a tryptamine exporter. In some embodiments, the genetically engineered bacteria comprise an exporter of one or more indole metabolites, in order to increase the export of indole metabolites produced.

[0598] Table 12 depicts non-limiting examples of contemplated polypeptide sequences, which are encoded by indole-3-propionate producing bacteria.

TABLE 12
Non-limiting Examples of Sequences for indole-3-propionate Production

| Description | Sequence |
|---|---|
| FldA: indole-3- | MENNTNMFSGVKVIELANFIAAPAAGRFFADGGAEVIKIESPA |
| propionyl- | GDPLRYTAPSEGRPLSQEENTTYDLENANKKAIVLNLKSEKGK |
| CoA:indole-3- | KILHEMLAEADILLTNWRTKALVKQGLDYETLKEKYPKLVFA |
| lactate CoA | QITGYGEKGPDKDLPGFDYTAFFARGGVSGTLYEKGTVPPNV |
| transferase from | VPGLGDHQAGMFLAAGMAGALYKAKTTGQGDKVTVSLMHS |
| Clostridium | AMYGLGIMIQAAQYKDHGLVYPINRNETPNPFIVSYKSKDDYF |
| sporogenes | VQVCMPPYDVFYDRFMTALGREDLVGDERYNKIENLKDGRA |
| SEQ ID NO: 173 | KEVYSIIEQQMVTKTKDEWDKIFRDADIPFAIAQTWEDLLEDE |
| | QAWANDYLYKMKYPTGNERALVRLPVFFKEAGLPEYNQSPQI |
| | AENTVEVLKEMGYTEQEIEELEKDKDIMVRKEK |
| FldB: subunit of | MSDRNKEVKEKKAKHYLREITAKHYKEALEAKERGEKVGWC |
| indole-3-lactate | ASNFPQEIATTLGVKVVYPENHAAAVAARGNGQNMCEHAEA |
| dehydratase from | MGFSNDVCGYARVNLAVMDIGHSEDQPIPMPDFVLCCNNICN |
| | QMIKWYEHIAKTLDIPMILIDIPYNTENTVSQDRIKYIRAQFDD |
| Clostridium | AIKQLEEITGKKWDENKFEEVMKISQESAKQWLRAASYAKYK |
| sporogenes | PSPFSGFDLFNHMAVAVCARGTQEAADAFKMLADEYEENVKT |
| SEQ ID NO: 174 | GKSTYRGEEKQRILFEGIACWPYLRHKLTKLSEYGMNVTATV |
| | YAEAFGVIYENMDELMAAYNKVPNSISFENALKMRLNAVTST |
| | NTEGAVIHINRSCKLWSGFLYELARRLEKETGIPVVSFDGDQA |
| | DPRNFSEAQYDTRIQGLNEVMVAKKEAE |
| FldC: subunit of | MSNSDKFFNDFKDIVENPKKYIMKHMEQTGQKAIGCMPLYTP |
| indole-3 -lactate | EELVLAAGMFPVGVWGSNTELSKAKTYFPAFICSILQTTLENA |
| dehydratase from | LNGEYDMLSGMMITNYCDSLKCMGQNFKLTVENIEFIPVTVPQ |
| Clostridium | NRKMEAGKEFLKSQYKMNIEQLEKISGNKITDESLEKAIEIYDE |
| sporogenes | HRKVMNDFSMLASKYPGIITPTKRNYVMKSAYYMDKKEHTE |
| SEQ ID NO: 175 | KVRQLMDEIKAIEPKPFEGKRVITTGIIADSEDLLKILEENNIAIV |
| | GDDIAHESRQYRTLTPEANTPMDRLAEQFANRECSTLYDPEKK |
| | RGQYIVEMAKERKADGIIFFMTKFCDPEEYDYPQMKKDFEEA |
| | GIPHVLIETDMQMKNYEQARTAIQAFSETL |
| FldD: indole-3- | MFFTEQHELIRKLARDFAEQEIEPIADEVDKTAEFPKEIVKKMA |
| acrylyl-CoA | QNGFFGIKMPKEYGGAGADNRAYVTIMEEISRASGVAGIYLSS |
| reductase from | PNSLLGTPFLLVGTDEQKEKYLKPMIRGEKTLAFALTEPGAGS |
| Clostridium | DAGALATTAREEGDYYILNGRKTFITGAPISDNIIVFAKTDMSK |
| sporogenes | GTKGITTFIVDSKQEGVSFGKPEDKMGMIGCPTSDIILENVKVH |
| SEQ ID NO: 176 | KSDILGEVNKGFITAMKTLSVGRIGVASQALGIAQAAVDEAVK |
| | YAKQRKQFNRPIAKFQAIQFKLANMETKLNAAKLLVYNAAYK |
| | MDCGEKADKEASMAKYFAAESAIQIVNDALQIHGGYGYIKDY |
| | KIERLYRDVRVIAIYEGTSEVQQMVIASNLLK |
| FldH1: indole-3- | MKILAYCVRPDEVDSFKKFSEKYGHTVDLIPDSFGPNVAHLAK |
| lactate | GYDGISILGNDTCNREALEKIKDCGIKYLATRTAGVNNIDFDA |
| dehydrogenase | AKEFGINVANVPAYSPNSVSEFTIGLALSLTRKIPFALKRVELN |
| from Clostridium | NFALGGLIGVELRNLTLGVIGTGRIGLKVIEGFSGFGMKKMIGY |
| sporogenes | DIFENEEAKKYIEYKSLDEVFKEADIITLHAPLTDDNYHMIGKE |
| SEQ ID NO: 177 | SIAKMKDGVFIINAARGALIDSEALIEGLKSGKIAGAALDSYEY |
| | EQGVFHNNKMNEIMQDDTLERLKSFPNVVITPHLGFYTDEAVS |
| | NMVEITLMNLQEFELKGTCKNQRVCK |
| FldH2: indole-3- | MKILMYSVREHEKPAIKKWLEANPGVQIDLCNNALSEDTVCK |
| lactate | AKEYDGIAIQQTNSIGGKAVYSTLKEYGIKQIASRTAGVDMIDL |
| dehydrogenase | KMASDSNILVTNVPAYSPNAIAELAVTHTMNLLRNIKTLNKRI |
| from Clostridium | AYGDYRWSADLIAREVRSVTVGVVGTGKIGRTSAKLFKGLGA |
| sporogenes | NVIGYDAYPDKKLEENNLLTYKESLEDLLREADVVTLHTPLLE |
| SEQ ID NO: 178 | STKYMINKNNLKYMKPDAFIVNTGRGGIINTEDLIEALEQNKIA |
| | GAALDTFENEGLFLNKVVDPTKLPDSQLDKLLKMDQVLITHH |
| | VGFFTTTAVQNIVDTSLDSVVEVLKTNNSVNKVN |
| AcuI: acrylyl- | MRAVLIEKSDDTQSVSVTELAEDQLPEGDVLVDVAYSTLNYK |
| CoA reductase | DALAITGKAPVVRRFPMVPGIDFTGTVAQSSHADFKPGDRVIL |
| from Rhodobacter | NGWGVGEKHWGGLAERARVRGDWLVPLPAPLDLRQAAMIG |
| sphaeroides | TAGYTAMLCVLALERHGVVPGNGEIVVSGAAGGVGSVATTLL |
| SEQ ID NO: 179 | AAKGYEVAAVTGRASEAEYLRGLGAASVIDRNELTGKVRPLG |
| | QERWAGGIDVAGSTVLANMLSMMKYRGVVAACGLAAGMDL |
| | PASVAPFILRGMTLAGVDSVMCPKTDRLAAWARLASDLDPAK |
| | LEEMTTELPFSEVIETAPKFLDGTVRGRIVIPVTP |

[0599] In one embodiment, the tryptophan pathway catabolic enzyme encoded by the genetically engineered bacteria has at least about 80% identity with the entire sequence of one or more of SEQ ID NO: 173 through SEQ ID NO: 179. In another embodiment, the tryptophan pathway catabolic enzyme has at least about 85% identity with the entire sequence of one or more SEQ ID NO: 173 through SEQ ID NO: 179. In one embodiment, the tryptophan pathway catabolic enzyme has at least about 90% identity with the entire sequence of one or more SEQ ID NO: 173 through SEQ ID NO: 179. In one embodiment, the tryptophan pathway catabolic enzyme has at least about 95% identity with the entire sequence of one or more SEQ ID NO: 173 through SEQ ID NO: 179. In another embodiment, the tryptophan pathway catabolic enzyme has at least about 96%, 97%, 98%, or 99% identity with the entire sequence of one or more SEQ ID NO: 173 through SEQ ID NO: 179. Accordingly, in one embodiment, the tryptophan pathway catabolic enzyme has at least about 80%, 81%, 82%, 83%, 84%, 85%, 86%, 87%, 88%, 89%, 90%, 91%, 92%, 93%, 94%, 95%, 96%, 97%, 98%, or 99% identity with the entire sequence of one or more SEQ ID NO: 173 through SEQ ID NO: 179. In another embodiment, the tryptophan pathway catabolic enzyme comprises the sequence of one or more SEQ ID NO: 173 through SEQ ID NO: 179. In yet another embodiment the tryptophan pathway catabolic enzyme consists of the sequence of one or more SEQ ID NO: 173 through SEQ ID NO: 179.

[0600] In some embodiments, the genetically engineered bacteria comprise a gene cassette for the production of one or more indole pathway metabolites described herein from tryptophan or a tryptophan metabolite. In some embodiments, the genetically engineered bacteria take up tryptophan through an endogenous or exogenous transporter as described above herein. In some embodiments, the genetically engineered bacteria additionally produce tryptophan and/or chorismate through any of the pathways described herein, e.g. FIG. 43, FIG. 49A and FIG. 49B. In some embodiments, the genetically engineered bacteria comprise an exporter of one or more indole metabolites, in order to increase the export of indole metabolites produced.

[0601] In some embodiments, the genetically engineered bacteria are capable of expressing any one or more of the described circuits in low-oxygen conditions, in the presence of disease or tissue specific molecules or metabolites, in the presence of molecules or metabolites associated with inflammation or an inflammatory response or immune suppression or in the presence of some other metabolite that may or may not be present in the gut, such as arabinose or tetracycline. In some embodiments, any one or more of the described circuits are present on one or more plasmids (e.g., high copy or low copy) or are integrated into one or more sites in the bacterial chromosome. In some embodiments, the tryptophan synthesis and/or tryptophan catabolism cassette(s) is under control of an inducible promoter. Exemplary inducible promoters which may control the expression of the at least one sequence(s) include oxygen level-dependent promoters (e.g., FNR-inducible promoter), promoters induced by inflammation or an inflammatory response (RNS, ROS promoters), and promoters induced by a metabolite that may or may not be naturally present (e.g., can be exogenously added) in the gut, e.g., arabinose and tetracycline.

[0602] Also, in some embodiments, the genetically engineered bacteria are further capable of expressing any one or more of the described circuits and further comprise one or more of the following: (1) one or more auxotrophies, such as any auxotrophies known in the art and provided herein, e.g., thyA auxotrophy, (2) one or more kill switch circuits, such as any of the kill-switches described herein or otherwise known in the art, (3) one or more antibiotic resistance circuits, (4) one or more transporters for importing biological molecules or substrates, such any of the transporters described herein or otherwise known in the art, (5) one or more exporters for exporting biological molecules or substrates, such any of the exporters described herein or otherwise known in the art, (6) one or more secretion circuits, such as any of the secretion circuits described herein and otherwise known in the art, and (7) combinations of one or more of such additional circuits.

[0603] Trypophan Repressor (TrpR)

[0604] In any of these embodiments, the tryptophan repressor (trpR) optionally may be deleted, mutated, or modified so as to diminish or obliterate its repressor function. Also, in any of these embodiments, the genetically engineered bacteria optionally comprise gene sequence(s) to produce the tryptophan precursor, Chorismate, e.g., sequence(s) encoding aroG, aroF, aroH, aroB, aroD, aroE, aroK, and AroC.

[0605] In some embodiments, the expression of the gene sequences(s) is controlled by an inducible promoter. In some embodiments, the expression of the gene sequences(s) is controlled by a constitutive promoter. In some embodiments, the gene sequences(s) are controlled by an inducible and/or constitutive promoter, and are expressed during bacterial culture in vitro, e.g., for bacterial expansion, production and/or manufacture, as described herein. In some embodiments, the gene sequences(s) are controlled by an inducible and/or constitutive promoter, and are expressed in vivo, e.g., in the gut.

[0606] Trypophan and Tryptophan Metabolite Transport

[0607] Metabolite transporters may further be expressed or modified in the genetically engineered bacteria of the invention in order to enhance tryptophan or KP metabolite transport into the cell.

[0608] The inner membrane protein YddG of E. coli, encoded by the yddG gene, is a homologue of the known amino acid exporters RhtA and YdeD. Studies have shown that YddG is capable of exporting aromatic amino acids, including tryptophan. Thus, YddG can function as a tryptophan exporter or a tryptophan secretion system (or tryptophan secretion protein). Other aromatic amino acid exporters are described in Doroshenko et al., FEMS Microbiol. Lett., 275:312-318 (2007). Thus, in some embodiments, the engineered bacteria optionally further comprise gene sequence(s) encoding YddG. In some embodiments, the engineered bacteria can over-express YddG. In some embodiments, the engineered bacteria optionally comprise one or more copies of yddG gene.

[0609] In some embodiments, the engineered microbe has a mechanism for importing (transporting) Kynurenine from the local environment into the cell. Thus, in some embodiments, the genetically engineered bacteria comprise gene sequence(s) encoding a kynureninase secreter. In some embodiments, the genetically engineered bacteria comprise one or more copies of aroP, tnaB or mir gene.

[0610] In some embodiments the genetically engineered bacteria comprise a transporter to facilitate uptake of tryptophan into the cell. Three permeases, Mtr, TnaB, and AroP, are involved in the uptake of L-tryptophan in Escherichia coli. In some embodiments, the genetically engineered bacteria comprise one or more copies of one or more of Mtr, TnaB, and AroP.

[0611] In some embodiments, the genetically engineered bacteria of the invention also comprise multiple copies of the the transporter gene. In some embodiments, the genetically engineered bacteria of the invention also comprise a transport gene from a different bacterial species. In some embodiments, the genetically engineered bacteria of the invention comprise multiple copies of a transporter gene from a different bacterial species. In some embodiments, the native transporter gene in the genetically engineered bacteria of the invention is not modified. In some embodiments, the genetically engineered bacteria of the invention comprise a transporter gene that is controlled by its native promoter, an inducible promoter, or a promoter that is stronger than the native promoter, e.g., a GlnRS promoter, a P(Bla) promoter, or a constitutive promoter.

[0612] In some embodiments, the native transporter gene in the genetically engineered bacteria is not modified, and one or more additional copies of the native transporter gene are inserted into the genome under the control of the same inducible promoter that controls expression of the payload, e.g., a FNR promoter, or a different inducible promoter than the one that controls expression of the payload or a constitutive promoter. In alternate embodiments, the native transporter gene is not modified, and a copy of a non-native transporter gene from a different bacterial species is inserted into the genome under the control of the same inducible promoter that controls expression of the payload, e.g., a FNR promoter, or a different inducible promoter than the one that controls expression of the payload or a constitutive promoter.

[0613] In some embodiments, the expression of the gene sequences(s) is controlled by an inducible promoter. In some embodiments, the expression of the gene sequences(s) is controlled by a constitutive promoter. In some embodiments, the gene sequences(s) are controlled by an inducible and/or constitutive promoter, and are expressed during bacterial culture in vitro, e.g., for bacterial expansion, production and/or manufacture, as described herein. In some embodiments, the gene sequences(s) are controlled by an inducible and/or constitutive promoter, and are expressed in vivo, e.g., in the gut.

[0614] In some embodiments, the expression of the gene sequences(s) is controlled by an inducible promoter. In some embodiments, the expression of the gene sequences(s) is controlled by a constitutive promoter. In some embodiments, the gene sequences(s) are controlled by an inducible and/or constitutive promoter, and are expressed during bacterial culture in vitro, e.g., for bacterial expansion, production and/or manufacture, as described herein. In some embodiments, the gene sequences(s) are controlled by an inducible and/or constitutive promoter, and are expressed in vivo, e.g., in the gut.

[0615] In some embodiments, the native transporter gene in the genetically engineered bacteria is not modified, and one or more additional copies of the native transporter gene are present in the bacteria on a plasmid and under the control of the same inducible promoter that controls expression of the payload e.g., a FNR promoter, or a different inducible promoter than the one that controls expression of the payload or a constitutive promoter. In alternate embodiments, the native transporter gene is not modified, and a copy of a non-native transporter gene from a different bacterial species is present in the bacteria on a plasmid and under the control of the same inducible promoter that controls expression of the payload, e.g., a FNR promoter, or a different inducible promoter than the one that controls expression of the payload or a constitutive promoter.

[0616] In some embodiments, the expression of the gene sequences(s) is controlled by an inducible promoter. In some embodiments, the expression of the gene sequences(s) is controlled by a constitutive promoter. In some embodiments, the gene sequences(s) are controlled by an inducible and/or constitutive promoter, and are expressed during bacterial culture in vitro, e.g., for bacterial expansion, production and/or manufacture, as described herein. In some embodiments, the gene sequences(s) are controlled by an inducible and/or constitutive promoter, and are expressed in vivo, e.g., in the gut.

[0617] In some embodiments, the native transporter gene is mutagenized, the mutants exhibiting increased ammonia transport are selected, and the mutagenized transporter gene is isolated and inserted into the genetically engineered bacteria. In some embodiments, the native transporter gene is mutagenized, mutants exhibiting increased ammonia transport are selected, and those mutants are used to produce the bacteria of the invention. The transporter modifications described herein may be present on a plasmid or chromosome.

[0618] In some embodiments, the genetically engineered bacterium is E. coli Nissle, and the native transporter gene in E. coli Nissle is not modified; one or more additional copies the native E. coli Nissle transporter genes are inserted into the E. coli Nissle genome under the control of the same inducible promoter that controls expression of the payload e.g., a FNR promoter, or a different inducible promoter than the one that controls expression of the payload or a constitutive promoter. In an alternate embodiment, the native transporter gene in E. coli Nissle is not modified, and a copy of a non-native transporter gene from a different bacterium, e.g., Lactobacillus plantarum, is inserted into the E. coli Nissle genome under the control of the same inducible promoter that controls expression of the payload, e.g., a FNR promoter, or a different inducible promoter than the one that controls expression of the payload or a constitutive promoter.

[0619] In some embodiments, the expression of the gene sequences(s) encoding the transporter is controlled by an inducible promoter. In some embodiments, the expression of the gene sequences(s) encoding the transporter is controlled by a constitutive promoter. In some embodiments, the expression of the gene sequences(s) encoding the transporter is controlled by an inducible and/or constitutive promoter, and are expressed during bacterial culture in vitro, e.g., for bacterial expansion, production and/or manufacture, as described herein. In some embodiments, the expression of the gene sequences(s) encoding the transporter is controlled by an inducible and/or constitutive promoter, and are expressed in vivo, e.g., in the gut.

[0620] In some embodiments, the genetically engineered bacterium is E. coli Nissle, and the native transporter gene in E. coli Nissle is not modified; one or more additional copies the native E. coli Nissle transporter genes are present in the bacterium on a plasmid and under the control of the same inducible promoter that controls expression of the payload, e.g., a FNR promoter, or a different inducible promoter than the one that controls expression of the payload, or a constitutive promoter. In an alternate embodiment, the native transporter gene in E. coli Nissle is not modified, and a copy of a non-native transporter gene from a different bacterium, e.g., Lactobacillus plantarum, are present in the bacterium on a plasmid and under the control of the same inducible promoter that controls expression of the payload, e.g., a FNR promoter, or a different inducible promoter than the one that controls expression of the payload, or a constitutive promoter.

[0621] In some embodiments, the expression of the gene sequences(s) encoding the transporter is controlled by an inducible promoter. In some embodiments, the expression of the gene sequences(s) encoding the transporter is controlled by a constitutive promoter. In some embodiments, the expression of the gene sequences(s) encoding the transporter is controlled by an inducible and/or constitutive promoter, and are expressed during bacterial culture in vitro, e.g., for bacterial expansion, production and/or manufacture, as described herein. In some embodiments, the expression of the gene sequences(s) encoding the transporter is controlled by an inducible and/or constitutive promoter, and are expressed in vivo, e.g., in the gut.

### Secreted Polypeptides

[0622] IL-10

[0623] In some embodiments, the genetically engineered bacteria of the invention are capable of producing IL-10. Interleukin-10 (IL-10) is a class 2 cytokine, a category which includes cytokines, interferons, and interferon-like molecules, such as IL-19, IL-20, IL-22, IL-24, IL-26, IL-28A, IL-28B, IL-29, IFN-α, IFN-β, IFN-δ, IFN-ε, IFN-κ, IFN-τ, IFN-Ω, and limiting. IL-10 is an anti-inflammatory cytokine that signals through two receptors, IL-10R1 and IL-10R2. Anti-inflammatory properties of human IL-10 include down-regulation of pro-inflammatory cytokines, inhibition of antigen presentation on dendritic cells or suppression of major histocompatibility complex expression. Deficiencies in IL-10 and/or its receptors are associated with IBD and intestinal sensitivity (Nielsen, 2014). Bacteria expressing IL-10 or protease inhibitors may ameliorate conditions such as Crohn's disease and ulcerative colitis (Simpson et al., 2014). The genetically engineered bacteria may comprise any suitable gene encoding IL-10, e.g., human IL-10. In some embodiments, the gene encoding IL-10 is modified and/or mutated, e.g., to enhance stability, increase IL-10 production, and/or increase anti-inflammatory potency under inducing conditions. In some embodiments, the genetically engineered bacteria are capable of producing IL-10 under inducing conditions, e.g., under a condition(s) associated with inflammation. In some embodiments, the genetically engineered bacteria are capable of producing IL-10 in low-oxygen conditions. In some embodiments, the genetically engineered bacteria comprise a nucleic acid sequence that encodes IL-10. In some embodiments, the genetically engineered bacteria comprise a nucleic acid sequence comprising SEQ ID NO: 134 or a functional fragment thereof. In some embodiments, genetically engineered bacteria comprise a nucleic acid sequence that is at least about 80%, at least about 85%, at least about 90%, at least about 95%, or at least about 99% homologous to a nucleic acid sequence comprising SEQ ID NO: 49 or a functional fragment thereof.

TABLE 13
IL-10 (SEQ ID NO: 134)
ATGAGCCCCGGACAGGGAACTCAAAGCGAGAACAGCTGCACACATTTTC
CAGGTAATCTTCCAAATATGCTTCGTGACTTGCGTGACGTTTCTCTCGC
GTGAAAACCTTTTTTCAGATGAAGGATCAGTTAGATAATCTGCTGCTGA
AAGAATCGCTTCTTGAGGACTTCAAGGGATATCTGGGATGTCAGGCGTT
ATCTGAGATGATTCAGTTTTATTTGGAAGAAGTTATGCCCCAGGCTGAG
AATCAAGACCCTGACATCAAAGCGCATGTGAATAGCCTGGGCGAGAATC
TGAAGACACTGCGCCTGCGTCTTCGCCGCTGTCACCGTTTTCTGCCTTG
CGAAAATAAGAGTAAGGCCGTTGAGCAAGTGAAAAATGCTTTCAACAAG
TTACAAGAAAAAGGGATTTACAAAGCTATGTCTGAGTTTGACATTTTCA
TTAATTACATTGAGGCCTACATGACTATGAAGATTCGCAAT

[0624] Wild type IL-10 (wtIL-10) is a domain swapped dimer whose structural integrity depends on the dimerization of two peptide chains. wtIL-10 was converted to a monomeric isomer by inserting 6 amino acids into the loop connecting the swapped secondary structural elements (see, e.g., Josephson, K. et al. Design and analysis of an engineered human interleukin-10 monomer. J. Biol. Chem. 275, 13552-13557 (2000), and Yoon, S. I. et al. Epstein-Barr Virus IL-10 Engages IL-10R1 by a Two-step Mechanism Leading to Altered Signaling Properties. J. Biol. Chem. 287, 26586-26595 (2012). Monomoerized IL-10 therefore comprises a small linker which deviates from the wild-type human IL-10 sequence. This linker causes the IL10 to become active as a monomer rather than a dimer (see, e.g., Josephson, K. et al. Design and analysis of an engineered human interleukin-10 monomer. J. Biol. Chem. 275, 13552-13557 (2000), and Yoon, S I. et al. Epstein-Barr Virus IL-10 Engages IL-10R1 by a Two-step Mechanism Leading to Altered Signaling Properties. J. Biol. Chem. 287, 26586-26595 (2012)).

[0625] Secretion of a monomeric protein may have advantages, avoiding the extra step of dimerization in the periplasmic space. Moreover, there is more flexibility in the selection of appropriate secretion systems. For example, the tat-dependent secretion system secretes polypeptides in a folded fashion. Dimers cannot fold correctly without the formation of disulfide bonds. Disulfide bonds, however, cannot form in the reducing intracellular environment and require the oxidizing environment of the periplasm to form. Therefore, the tat-dependent system may no be appropriate for the secretion of proteins which require dimerization to function properly.

[0626] In some embodiments, the genetically engineered bacteria of the invention are capable of producing monomerized human IL-10. In some embodiments, the genetically engineered bacteria are capable of producing monomerized IL-10 under inducing conditions, e.g., under a condition(s) associated with inflammation. In some embodiments, the genetically engineered bacteria are capable of producing monomerized IL-10 in low-oxygen conditions. In some embodiments, the genetically engineered bacteria comprise a nucleic acid sequence that encodes monomerized IL-10. In some embodiments, the genetically engineered bacteria comprise a nucleic acid sequence comprising SEQ ID NO: 198 or a functional fragment thereof. In some embodiments, genetically engineered bacteria comprise a nucleic acid sequence that is at least about 80%, at least about 85%, at least about 90%, at least about 95%, or at least about 99% homologous to a nucleic acid sequence comprising SEQ ID NO: 198 or a functional fragment thereof. In some embodiments, the genetically engineered bacteria comprise a sequence which encodes the polypeptide encoded by SEQ ID NO: 198 or a fragment or functional variant thereof. In some embodiments, the monomerized IL-10 expressed by the bacteria stimulates IL-10R1 and IL-10R2 and initiates signal transduction. Signaling includes Stat signaling, e.g. through the phosphorylation of Tyr705 and/or Ser727.

[0627] In some embodiments, the genetically engineered bacteria of the invention are capable of producing viral IL-10. Exemplary viral IL-10 homologues encoded by the bacteria include human cytomegalo- (HCMV) and Epstein-Barr virus (EBV) IL-10. Apart from its anti-inflammatory effects, human IL-10 also possesses pro-inflammatory activity, e.g., stimulation of B-cell maturation and proliferation of natural killer cells (Foerster et al., Secretory expression of biologically active human Herpes virus interleukin-10 analogues in Escherichia coli via a modified Sec-dependent transporter construct, BMC Biotechnol. 2013; 13: 82, and references therein). In contrast, viral IL-10 homologues share many biological activities of hIL-10 but, due to selective pressure during virus evolution and the need to escape the host immune system, also display unique traits, including increased stability and lack of immunostimulatory functions (Foerster et al, and references therein). As such, viral counterparts may be useful and possibly more effective than hIL-10 with respect to anti-inflammatory and/or immune suppressing effects.

[0628] In some embodiments, the genetically engineered bacteria are capable of producing viral IL-10 under inducing conditions, e.g., under a condition(s) associated with inflammation. In some embodiments, the genetically engineered bacteria are capable of producing viral IL-10 in low-oxygen conditions. In some embodiments, the genetically engineered bacteria comprise a nucleic acid sequence that encodes viral IL-10. In some embodiments, the genetically engineered bacteria comprise a nucleic acid sequence comprising SEQ ID NO: 193 and/or SEQ ID NO: 194 or a functional fragment thereof. In some embodiments, genetically engineered bacteria comprise a nucleic acid sequence that is at least about 80%, at least about 85%, at least about 90%, at least about 95%, or at least about 99% homologous to a nucleic acid sequence comprising SEQ ID NO: 193 and/or SEQ ID NO: 194 or a functional fragment thereof. In some embodiments, the viral d IL-10 expressed by the bacteria stimulates IL-10R1 and IL-10R2 and initiates signal transduction. Signaling includes Stat signaling, e.g. through the phosphorylation of Tyr705 and/or Ser727.

[0629] To improve acetate production, while maintaining high levels of IL-10 secretion, targeted one or more deletions can be introduced in competing metabolic arms of mixed acid fermentation to prevent the production of alternative metabolic fermentative byproducts (thereby increasing acetate production). Non-limiting examples of competing such competing metabolic arms are frdA (converts phosphoenolpyruvate to succinate), ldhA (converts pyruvate to lactate) and adhE (converts Acetyl-CoA to Ethanol). Deletions which may be introduced therefore include deletion of adhE, ldh, and frd. Thus, in certain embodiments, the genetically engineered bacteria comprise one or more gene sequence(s) encoding one or more IL-10 polypeptides for secretion and further comprise mutations and/or deletions in one or more of frdA, ldhA, and adhE.

[0630] In some embodiments, the genetically engineered bacteria comprise one or more gene sequence(s) encoding one or more IL-10-polypeptides for secretion described herein and one or more mutation(s) and/or deletion(s) in one or more genes selected from the ldhA gene, the frdA gene and the adhE gene.

[0631] In some embodiments, the genetically engineered bacteria comprise one or more gene sequence(s) encoding one or more IL-10 polypeptides for secretion and further comprise a mutation and/or deletion in one or more endogenous genes selected from in the ldhA gene, the frdA gene and the adhE genes. In some embodiments, the genetically engineered bacteria comprise one or more gene sequence(s) encoding one or more IL-10 polypeptides for secretion and further comprise a mutation and/or deletion in the endogenous ldhA gene. In some embodiments, the genetically engineered bacteria comprise one or more gene sequence(s) encoding one or more IL-10 polypeptides for secretion and further comprise a mutation and/or deletion in the endogenous adhE gene. In some embodiments, the genetically engineered bacteria comprise one or more gene sequence(s) encoding one or more IL-10 polypeptides for secretion and further comprise a mutation and/or deletion in the endogenous frdA gene. In some embodiments, the genetically engineered bacteria comprise one or more gene sequence(s) encoding one or more IL-10 polypeptides for secretion and further comprise a mutation and/or deletion in the endogenous ldhA and rdA genes. In some embodiments, the genetically engineered bacteria comprise one or more gene sequence(s) encoding one or more IL-10 polypeptides for secretion and further comprise a mutation and/or deletion in the endogenous ldhA genes and adhE genes. In some embodiments, the genetically engineered bacteria comprise one or more gene sequence(s) encoding one or more IL-10 polypeptides for secretion and further comprise a mutation and/or deletion in the endogenous frdA and adhE genes. In some embodiments, the genetically engineered bacteria comprise one or more gene sequence(s) encoding one or more IL-10 polypeptides for secretion and further comprise a mutation and/or deletion in the endogenous ldhA, the frdA, and adhE genes. In some embodiments, the genetically engineered bacteria comprise one or more gene sequence(s) encoding one or more IL-10 polypeptides for secretion and further comprise a mutation and/or deletion in one or more endogenous genes selected from in the ldhA gene, the frdA gene and the adhE genes.

[0632] In some embodiments, the genetically engineered bacteria comprise one or more gene sequence(s) selected from PhoA-IL-10, OmpF-IL-10, and TorA-IL-10 and further comprise a mutation and/or deletion in the endogenous ldhA gene. In some embodiments, the genetically engineered bacteria comprise one or more gene sequence(s) selected from PhoA-IL-10, OmpF-IL-10, and TorA-IL-10 and further comprise a mutation and/or deletion in the endogenous adhE gene. In some embodiments, the genetically engineered bacteria comprise one or more gene sequence(s) selected from PhoA-IL-10, OmpF-IL-10, and TorA-IL-10 and further comprise a mutation and/or deletion in the endogenous frdA gene. In some embodiments, the genetically engineered bacteria comprise one or more gene sequence(s) selected from PhoA-IL-10, OmpF-IL-10, and TorA-IL-10 and further comprise a mutation and/or deletion in the endogenous ldhA and frdA genes. In some embodiments, the genetically engineered bacteria comprise one or more gene sequence(s) selected from PhoA-IL-10, OmpF-IL-10, and TorA-IL-10 and further comprise a mutation and/or deletion in the endogenous ldhA genes and adhE genes. In some embodiments, the genetically engineered bacteria comprise one or more gene sequence(s) selected from PhoA-IL-10, OmpF-IL-10, and TorA-IL-O1 and further comprise a mutation and/or deletion in the endogenous frdA and adhE genes. In some embodiments, the genetically engineered bacteria comprise one or more gene sequence(s) selected from PhoA-IL-10, OmpF-IL-10, and TorA-IL-10 and further comprise a mutation and/or deletion in the endogenous ldhA, the frdA, and adhE genes. In some embodiments, the genetically engineered bacteria produce 0% to to 2% to 4%, 4% to 6%, 6% to 8%, 8% to 10%, 10% to 12%, 12% to 14%, 14% to 16%, 16% to 18%, 18% to 20%, 20% to 25%, 25% to 30%, 30% to 35%, 35% to 40%, 40% to 45% 45% to 50%, 50% to 55%, 55% to 60%, 60% to 65%, 65% to 70% to 80%, 80% to 90%, or 90% to 100% more acetate than unmodified bacteria of the same bacterial subtype under the same conditions. In yet another embodiment, the genetically engineered bacteria produce 1.0-1.2-fold, 1.2-1.4-fold, 1.4-1.6-fold, 1.6-1.8-fold, 1.8-2-fold, or two-fold more acetate than unmodified bacteria of the same bacterial subtype under the same conditions. In yet another embodiment, the genetically engineered bacteria produce three-fold, four-fold, five-fold, six-fold, seven-fold, eight-fold, nine-fold, ten-fold, fifteen-fold, twenty-fold, thirty-fold, forty-fold, or fifty-fold, more acetate than unmodified bacteria of the same bacterial subtype under the same conditions.

[0633] In some embodiments, the genetically engineered bacteria produce 0% to 2% to 4%, 4% to 6%, 6% to 8%, 8% to 10%, 10% to 12%, 12% to 14%, 14% to 16%, 16% to 18%, 18% to 20%, 20% to 25%, 25% to 30%, 30% to 35%, 35% to 40%, 40% to 45% 45% to 50%, 50% to 55%, 55% to 60%, 60% to 65%, 65% to 70% to 80%, 80% to 90%, or 90% to 100% more IL-10 than unmodified bacteria of the same bacterial subtype under the same conditions. In yet another embodiment, the genetically engineered bacteria produce 1.0-1.2-fold, 1.2-1.4-fold, 1.4-1.6-fold, 1.6-1.8-fold, 1.8-2-fold, or two-fold more IL-10 than unmodified bacteria of the same bacterial subtype under the same conditions. In yet another embodiment, the genetically engineered bacteria produce three-fold, four-fold, five-fold, six-fold, seven-fold, eight-fold, nine-fold, ten-fold, fifteen-fold, twenty-fold, thirty-fold, forty-fold, or fifty-fold, more IL-10 than unmodified bacteria of the same bacterial subtype under the same conditions.

[0634] In certain situations, the need may arise to prevent and/or reduce acetate production by of an engineered or naturally occurring strain, e.g., E. coli Nissle, while maintaining high levels of IL-10 secretion. Without wishing to be bound by theory, one or more mutations and/or deletions in one or more gene(s) encoding in one or more enzymes which function in the acetate producing metabolic arm of fermentation should reduce and/or prevent production of acetate. A non-limiting example of such an enzyme is phosphate acetyltransferase (Pta), which is the first enzyme in the metabolic arm converting acetyl-CoA to acetate. Deletion and/or mutation of the Pta gene or a gene encoding another enzyme in this metabolic arm may also allow for more acetyl-CoA to be used for IL-10 secretion. Additionally, one or more mutations preventing or reducing the flow through other metabolic arms of mixed acid fermentation, such as those which produce succinate, lactate, and/or ethanol can increase the production of acetyl-CoA, which is available for IL-10 synthesis. Such mutations and/or deletions, include but are not limited to mutations and/or deletions in the frdA, ldhA, and/or adhE genes.

[0635] In some embodiments, the genetically engineered bacteria comprise one or more gene sequence(s) encoding one or more IL-10 polypeptides for secretion and further comprise a mutation and/or deletion in the endogenous pta gene. In some embodiments, the genetically engineered bacteria comprise one or more gene sequence(s) encoding one or more IL-10 polypeptides for secretion and further comprise a mutation and/or deletion in the endogenous pta gene and in one or more endogenous genes selected from in the ldhA gene, the frdA gene and the adhE gene. In some embodiments, the genetically engineered bacteria comprise one or more gene sequence(s) encoding one or more IL-10 polypeptides for secretion and further comprise a mutation in the endogenous pta and adhE genes. In some embodiments, the genetically engineered bacteria comprise one or more gene sequence(s) encoding one or more IL-10 polypeptides for secretion and further comprise a mutation in the endogenous pta and ldhA genes. In some embodiments, the genetically engineered bacteria comprise one or more gene sequence(s) encoding one or more IL-10 polypeptides for secretion and further comprise a mutation in the endogenous pta and frdA genes. In some embodiments, the genetically engineered bacteria comprise one or more gene sequence(s) encoding one or more IL-10 polypeptides for secretion and further comprise a mutation and/or deletion in the endogenous pta, ldhA and frdA genes. In some embodiments, the genetically engineered bacteria comprise one or more gene sequence(s) encoding one or more IL-10 polypeptides for secretion and further comprise a mutation in the endogenous pta, ldhA, and adhE genes. In some embodiments, the genetically engineered bacteria comprise one or more gene sequence(s) encoding one or more IL-10 polypeptides for secretion and further comprise a mutation in the endogenous pta, frdA and adhE genes. In some embodiments, the genetically engineered bacteria comprise one or more gene sequence(s) encoding one or IL-10 polypeptides for secretion and further comprise a mutation and/or deletion in the endogenous pta, ldhA, frdA, and adhE genes.

[0636] In some embodiments, the genetically engineered bacteria comprise one or more gene sequence(s) selected from PhoA-IL-10, OmpF-IL-10, and TorA-IL-10 and further comprise a mutation and/or deletion in the endogenous pta gene. In some embodiments, the genetically engineered bacteria comprise one or more gene sequence(s) selected from PhoA-IL-10, OmpF-IL-10, and TorA-IL-10 and further comprise a mutation and/or deletion in the endogenous pta gene and in one or more endogenous genes selected from in the ldhA gene, the frdA gene and the adhE gene. In some embodiments, the genetically engineered bacteria comprise one or more gene sequence(s) selected from PhoA-IL-10, OmpF-IL-10, and TorA-IL-10 and further comprise a mutation in the endogenous pta and adhE genes. In some embodiments, the genetically engineered bacteria comprise one or more gene sequence(s) selected from PhoA-IL-10, OmpF-IL-10, and TorA-IL-10 and further comprise a mutation in the endogenous pta and ldhA genes.

[0637] In some embodiments, the genetically engineered bacteria comprise one or more gene sequence(s) selected from PhoA-IL-10, OmpF-IL-10, and TorA-IL-10 and further comprise a mutation in the endogenous pta and frdA genes. In some embodiments, the genetically engineered bacteria comprise one or more gene sequence(s) selected from PhoA-IL-10, OmpF-IL-10, and TorA-IL-10 and further comprise a mutation and/or deletion in the endogenous pta, ldhA and frdA genes. In some embodiments, the genetically engineered bacteria comprise one or more gene sequence(s) selected from PhoA-IL-10, OmpF-IL-10, and TorA-IL-10 and further comprise a mutation in the endogenous pta, ldhA, and adhE genes. In some embodiments, the genetically engineered bacteria comprise one or more gene sequence(s) selected from PhoA-IL-10, OmpF-IL-10, and TorA-IL-10 and further comprise a mutation in the endogenous pta, frdA and adhE genes. In some embodiments, the genetically engineered bacteria comprise one or more gene sequence(s) selected from PhoA-IL-10, OmpF-IL-10, and TorA-IL-10 and further comprise a mutation in the endogenous pta, ldhA, frdA, and adhE genes

[0638] In some embodiments, the genetically engineered bacteria produce 0% to to 2% to 4%, 4% to 6%, 6% to 8%, 8% to 10%, 10% to 12%, 12% to 14%, 14% to 16%, 16% to 18%, 18% to 20%, 20% to 25%, 25% to 30%, 30% to 35%, 35% to 40%, 40% to 45% 45% to 50%, 50% to 55%, 55% to 60%, 60% to 65%, 65% to 70% to 80%, 80% to 90%, or 90% to 100% less acetate than unmodified bacteria of the same bacterial subtype under the same conditions. In yet another embodiment, the genetically engineered bacteria produce 1.0-1.2-fold, 1.2-1.4-fold, 1.4-1.6-fold, 1.6-1.8-fold, 1.8-2-fold, or two-fold less acetate than unmodified bacteria of the same bacterial subtype under the same conditions. In yet another embodiment, the the genetically engineered bacteria produce three-fold, four-fold, five-fold, six-fold, seven-fold, eight-fold, nine-fold, ten-fold, fifteen-fold, twenty-fold, thirty-fold, forty-fold, or fifty-fold, less acetate than unmodified bacteria of the same bacterial subtype under the same conditions.

[0639] In some embodiments, the genetically engineered bacteria produce 0% to to 2% to 4%, 4% to 6%, 6% to 8%, 8% to 10%, 10% to 12%, 12% to 14%, 14% to 16%, 16% to 18%, 18% to 20%, 20% to 25%, 25% to 30%, 30% to 35%, 35% to 40%, 40% to 45% 45% to 50%, 50% to 55%, 55% to 60%, 60% to 65%, 65% to 70% to 80%, 80% to 90%, or 90% to 100% more IL-0 than unmodified bacteria of the same bacterial subtype under the same conditions. In yet another embodiment, the genetically engineered bacteria produce 1.0-1.2-fold, 1.2-1.4-fold, 1.4-1.6-fold, 1.6-1.8-fold, 1.8-2-fold, or two-fold more IL-10 than unmodified bacteria of the same bacterial subtype under the same conditions. In yet another embodiment, the the genetically engineered bacteria produce three-fold, four-fold, five-fold, six-fold, seven-fold, eight-fold, nine-fold, ten-fold, fifteen-fold, twenty-fold, thirty-fold, forty-fold, or fifty-fold, more IL-10 than unmodified bacteria of the same bacterial subtype under the same conditions.

[0640] IL-2

[0641] In some embodiments, the genetically engineered bacteria are capable of producing IL-2. Interleukin 2 (IL-2) mediates autoimmunity by preserving health of regulatory T cells (Treg). Treg cells, including those expressing Foxp3, typically suppress effector T cells that are active against self-antigens, and in doing so, can dampen autoimmune activity. IL-2 functions as a cytokine to enhance Treg cell differentiation and activity while diminished IL-2 activity can promote autoimmunity events. IL-2 is generated by activated CD4+ T cells, and by other immune mediators including activated CD8+ T cells, activated dendritic cells, natural killer cells, and NK T cells. IL-2 binds to IL-2R, which is composed of three chains including CD25, CD122, and CD132. IL-2 promotes growth of Treg cells in the thymus, while preserving their function and activity in systemic circulation. Treg cell activity plays an intricate role in the IBD setting, with murine studies suggesting a protective role in disease pathogenesis. In some embodiments, the genetically engineered bacteria comprise a nucleic acid sequence encoding SEQ ID NO: 135 or a functional fragment thereof. In some embodiments, genetically engineered bacteria comprise a nucleic acid sequence that is at least about 80%, at least about 85%, at least about 90%, at least about 95%, or at least about 99% homologous to a nucleic acid sequence encoding SEQ ID NO: 135 or a functional fragment thereof.

[0642] In some embodiments, the genetically engineered bacteria are capable of producing IL-2 under inducing conditions, e.g., under a condition(s) associated with inflammation. In some embodiments, the genetically engineered bacteria are capable of producing IL-2 in low-oxygen conditions.

TABLE 14
SEQ ID NO: 135

SEQ ID NO: 135
MAPTSSSTKK TQLQLEHLLL DLQMILNGIN NYKNPKLTRM
LTFKFYMPKK ATELKHLQCL EEELKPLEEV LNLAQSKNFH
LRPRDLISNI NVIVLELKGS ETTFMCEYAD ETATIVEFLN
RWITFCQSII STLT

[0643] To improve acetate production, while maintaining high levels of IL-2 secretion, targeted one or more deletions can be introduced in competing metabolic arms of mixed acid fermentation to prevent the production of alternative metabolic fermentative byproducts (thereby increasing acetate production). Non-limiting examples of competing such competing metabolic arms are frdA (converts phosphoenolpyruvate to succinate), ldhA (converts pyruvate to lactate) and adhE (converts Acetyl-CoA to Ethanol). Deletions which may be introduced therefore include deletion of adhE, ldh, and frd. Thus, in certain embodiments, the genetically engineered bacteria comprise one or more gene sequence(s) encoding one or more IL-2 polypeptides for secretion and further comprise mutations and/or deletions in one or more of frdA, ldhA, and adhE.

[0644] In some embodiments, the genetically engineered bacteria comprise one or more gene sequence(s) encoding one or more IL-2-polypeptides for secretion described herein and one or more mutation(s) and/or deletion(s) in one or more genes selected from the ldhA gene, the frdA gene and the adhE gene.

[0645] In some embodiments, the genetically engineered bacteria comprise one or more gene sequence(s) encoding one or more IL-2 polypeptides for secretion and further comprise a mutation and/or deletion in one or more endogenous genes selected from in the ldhA gene, the frdA gene and the adhE genes. In some embodiments, the genetically engineered bacteria comprise one or more gene sequence(s) encoding one or more IL-2 polypeptides for secretion and further comprise a mutation and/or deletion in the endogenous ldhA gene. In some embodiments, the genetically engineered bacteria comprise one or more gene sequence(s) encoding one or more IL-2 polypeptides for secretion and further comprise a mutation and/or deletion in the endogenous adhE gene. In some embodiments, the genetically engineered bacteria comprise one or more gene sequence(s) encoding one or more IL-2 polypeptides for secretion and further comprise a mutation and/or deletion in the endogenous frdA gene. In some embodiments, the genetically engineered bacteria comprise one or more gene sequence(s) encoding one or more IL-2 polypeptides for secretion and further comprise a mutation and/or deletion in the endogenous ldhA and rdA genes. In some embodiments, the genetically engineered bacteria comprise one or more gene sequence(s) encoding one or more IL-2 polypeptides for secretion and further comprise a mutation and/or deletion in the endogenous ldhA genes and adhE genes. In some embodiments, the genetically engineered bacteria comprise one or more gene sequence(s) encoding one or more IL-2 polypeptides for secretion and further comprise a mutation and/or deletion in the endogenous frdA and adhE genes. In some embodiments, the genetically engineered bacteria comprise one or more gene sequence(s) encoding one or more IL-2 polypeptides for secretion and further comprise a mutation and/or deletion in the endogenous ldhA, the frdA, and adhE genes. In some embodiments, the genetically engineered bacteria comprise one or more gene sequence(s) encoding one or more IL-2 polypeptides for secretion and further comprise a mutation and/or deletion in one or more endogenous genes selected from in the ldhA gene, the frdA gene and the adhE genes.

[0646] In some embodiments, the genetically engineered bacteria comprise one or more gene sequence(s) selected from PhoA-IL-2, OmpF-IL-2, and TorA-IL-2 and further comprise a mutation and/or deletion in the endogenous ldhA gene. In some embodiments, the genetically engineered bacteria comprise one or more gene sequence(s) selected from PhoA-IL-2, OmpF-IL-2, and TorA-IL-2 and further comprise a mutation and/or deletion in the endogenous adhE gene. In some embodiments, the genetically engineered bacteria comprise one or more gene sequence(s) selected from PhoA-IL-2, OmpF-IL-2, and TorA-IL-2 and further comprise a mutation and/or deletion in the endogenous frdA gene. In some embodiments, the genetically engineered bacteria comprise one or more gene sequence(s) selected from PhoA-IL-2, OmpF-IL-2, and TorA-IL-2 and further comprise a mutation and/or deletion in the endogenous ldhA and frdA genes. In some embodiments, the genetically engineered bacteria comprise one or more gene sequence(s) selected from PhoA-IL-2, OmpF-IL-2, and TorA-IL-2 and further comprise a mutation and/or deletion in the endogenous ldhA genes and adhE genes. In some embodiments, the genetically engineered bacteria comprise one or more gene sequence(s) selected from PhoA-IL-2, OmpF-IL-2, and TorA-IL-2 and further comprise a mutation and/or deletion in the endogenous frdA and adhE genes. In some embodiments, the genetically engineered bacteria comprise one or more gene sequence(s) selected from PhoA-IL-2, OmpF-IL-2, and TorA-IL-2 and further comprise a mutation and/or deletion in the endogenous ldhA, the frdA, and adhE genes. In some embodiments, the genetically engineered bacteria produce 0% to to 2% to 4%, 4% to 6%, 6% to 8%, 8% to 10%, 10% to 12%, 12% to 14%, 14% to 16%, 16% to 18%, 18% to 20%, 20% to 25%, 25% to 30%, 30% to 35%, 35% to 40%, 40% to 45% 45% to 50%, 50% to 55%, 55% to 60%, 60% to 65%, 65% to 70% to 80%, 80% to 90%, or 90% to 100% more acetate than unmodified bacteria of the same bacterial subtype under the same conditions. In yet another embodiment, the genetically engineered bacteria produce 1.0-1.2-fold, 1.2-1.4-fold, 1.4-1.6-fold, 1.6-1.8-fold, 1.8-2-fold, or two-fold more acetate than unmodified bacteria of the same bacterial subtype under the same conditions. In yet another embodiment, the genetically engineered bacteria produce three-fold, four-fold, five-fold, six-fold, seven-fold, eight-fold, nine-fold, ten-fold, fifteen-fold, twenty-fold, thirty-fold, forty-fold, or fifty-fold, more acetate than unmodified bacteria of the same bacterial subtype under the same conditions.

[0647] In some embodiments, the genetically engineered bacteria produce 0% to 2% to 4%, 4% to 6%, 6% to 8%, 8% to 10%, 10% to 12%, 12% to 14%, 14% to 16%, 16% to 18%, 18% to 20%, 20% to 25%, 25% to 30%, 30% to 35%, 35% to 40%, 40% to 45% 45% to 50%, 50% to 55%, 55% to 60%, 60% to 65%, 65% to 70% to 80%, 80% to 90%, or 90% to 100% more IL-2 than unmodified bacteria of the same bacterial subtype under the same conditions. In yet another embodiment, the genetically engineered bacteria produce 1.0-1.2-fold, 1.2-1.4-fold, 1.4-1.6-fold, 1.6-1.8-fold, 1.8-2-fold, or two-fold more IL-2 than unmodified bacteria of the same bacterial subtype under the same conditions. In yet another embodiment, the genetically engineered bacteria produce three-fold, four-fold, five-fold, six-fold, seven-fold, eight-fold, nine-fold, ten-fold, fifteen-fold, twenty-fold, thirty-fold, forty-fold, or fifty-fold, more IL-2 than unmodified bacteria of the same bacterial subtype under the same conditions.

[0648] In certain situations, the need may arise to prevent and/or reduce acetate production by of an engineered or naturally occurring strain, e.g., E. coli Nissle, while maintaining high levels of IL-2 secretion. Without wishing to be bound by theory, one or more mutations and/or deletions in one or more gene(s) encoding in one or more enzymes which function in the acetate producing metabolic arm of fermentation should reduce and/or prevent production of acetate. A non-limiting example of such an enzyme is phosphate acetyltransferase (Pta), which is the first enzyme in the metabolic arm converting acetyl-CoA to acetate. Deletion and/or mutation of the Pta gene or a gene encoding another enzyme in this metabolic arm may also allow for more acetyl-CoA to be used for IL-2 secretion. Additionally, one or more mutations preventing or reducing the flow through other metabolic arms of mixed acid fermentation, such as those which produce succinate, lactate, and/or ethanol can increase the production of acetyl-CoA, which is available for IL-2 synthesis. Such mutations and/or deletions, include but are not limited to mutations and/or deletions in the frdA, ldhA, and/or adhE genes.

[0649] In some embodiments, the genetically engineered bacteria comprise one or more gene sequence(s) encoding one or more IL-2 polypeptides for secretion and further comprise a mutation and/or deletion in the endogenous pta gene. In some embodiments, the genetically engineered bacteria comprise one or more gene sequence(s) encoding one or more IL-2 polypeptides for secretion and further comprise a mutation and/or deletion in the endogenous pta gene and in one or more endogenous genes selected from in the ldhA gene, the frdA gene and the adhE gene. In some embodiments, the genetically engineered bacteria comprise one or more gene sequence(s) encoding one or more IL-2 polypeptides for secretion and further comprise a mutation in the endogenous pta and adhE genes. In some embodiments, the genetically engineered bacteria comprise one or more gene sequence(s) encoding one or more IL-2 polypeptides for secretion and further comprise a mutation in the endogenous pta and ldhA genes. In some embodiments, the genetically engineered bacteria comprise one or more gene sequence(s) encoding one or more IL-2 polypeptides for secretion and further comprise a mutation in the endogenous pta and frdA genes. In some embodiments, the genetically engineered bacteria comprise one or more gene sequence(s) encoding one or more IL-2 polypeptides for secretion and further comprise a mutation and/or deletion in the endogenous pta, ldhA and frdA genes. In some embodiments, the genetically engineered bacteria comprise one or more gene sequence(s) encoding one or more IL-2 polypeptides for secretion and further comprise a mutation in the endogenous pta, ldhA, and adhE genes. In some embodiments, the genetically engineered bacteria comprise one or more gene sequence(s) encoding one or more IL-2 polypeptides for secretion and further comprise a mutation in the endogenous pta, frdA and adhE genes. In some embodiments, the genetically engineered bacteria comprise one or more gene sequence(s) encoding one or IL-2 polypeptides for secretion and further comprise a mutation and/or deletion in the endogenous pta, ldhA, frdA, and adhE genes.

[0650] In some embodiments, the genetically engineered bacteria comprise one or more gene sequence(s) selected from PhoA-IL-2, OmpF-IL-2, and TorA-IL-2 and further comprise a mutation and/or deletion in the endogenous pta gene. In some embodiments, the genetically engineered bacteria comprise one or more gene sequence(s) selected from PhoA-IL-2, OmpF-IL-2, and TorA-IL-2 and further comprise a mutation and/or deletion in the endogenous pta gene and in one or more endogenous genes selected from in the ldhA gene, the frdA gene and the adhE gene. In some embodiments, the genetically engineered bacteria comprise one or more gene sequence(s) selected from PhoA-IL-2, OmpF-IL-2, and TorA-IL-2 and further comprise a mutation in the endogenous pta and adhE genes. In some embodiments, the genetically engineered bacteria comprise one or more gene sequence(s) selected from PhoA-IL-2, OmpF-IL-2, and TorA-IL-2 and further comprise a mutation in the endogenous pta and ldhA genes.

[0651] In some embodiments, the genetically engineered bacteria comprise one or more gene sequence(s) selected from PhoA-IL-2, OmpF-IL-2, and TorA-IL-2 and further comprise a mutation in the endogenous pta and frdA genes. In some embodiments, the genetically engineered bacteria comprise one or more gene sequence(s) selected from PhoA-IL-2, OmpF-IL-2, and TorA-IL-2 and further comprise a mutation and/or deletion in the endogenous pta, ldhA and frdA genes. In some embodiments, the genetically engineered bacteria comprise one or more gene sequence(s) selected from PhoA-IL-2, OmpF-IL-2, and TorA-IL-2 and further comprise a mutation in the endogenous pta, ldhA, and adhE genes. In some embodiments, the genetically engineered bacteria comprise one or more gene sequence(s) selected from PhoA-IL-2, OmpF-IL-2, and TorA-IL-2 and further comprise a mutation in the endogenous pta, frdA and adhE genes. In some embodiments, the genetically engineered bacteria comprise one or more gene sequence(s) selected from PhoA-IL-2, OmpF-IL-2, and TorA-IL-2 and further comprise a mutation in the endogenous pta, ldhA, frdA, and adhE genes

[0652] In some embodiments, the genetically engineered bacteria produce 0% to to 2% to 4%, 4% to 6%, 6% to 8%, 8% to 10%, 10% to 12%, 12% to 14%, 14% to 16%, 16% to 18%, 18% to 20%, 20% to 25%, 25% to 30%, 30% to 35%, 35% to 40%, 40% to 45% 45% to 50%, 50% to 55%, 55% to 60%, 60% to 65%, 65% to 70% to 80%, 80% to 90%, or 90% to 100% less acetate than unmodified bacteria of the same bacterial subtype under the same conditions. In yet another embodiment, the genetically engineered bacteria produce 1.0-1.2-fold, 1.2-1.4-fold, 1.4-1.6-fold, 1.6-1.8-fold, 1.8-2-fold, or two-fold less acetate than unmodified bacteria of the same bacterial subtype under the same conditions. In yet another embodiment, the the genetically engineered bacteria produce three-fold, four-fold, five-fold, six-fold, seven-fold, eight-fold, nine-fold, ten-fold, fifteen-fold, twenty-fold, thirty-fold, forty-fold, or fifty-fold, less acetate than unmodified bacteria of the same bacterial subtype under the same conditions.

[0653] In some embodiments, the genetically engineered bacteria produce 0% to to 2% to 4%, 4% to 6%, 6% to 8%, 8% to 10%, 10% to 12%, 12% to 14%, 14% to 16%, 16% to 18%, 18% to 20%, 20% to 25%, 25% to 30%, 30% to 35%, 35% to 40%, 40% to 45% 45% to 50%, 50% to 55%, 55% to 60%, 60% to 65%, 65% to 70% to 80%, 80% to 90%, or 90% to 100% more IL-2 than unmodified bacteria of the same bacterial subtype under the same conditions. In yet another embodiment, the genetically engineered bacteria produce 1.0-1.2-fold, 1.2-1.4-fold, 1.4-1.6-fold, 1.6-1.8-fold, 1.8-2-fold, or two-fold more IL-2 than unmodified bacteria of the same bacterial subtype under the same conditions. In yet another embodiment, the the genetically engineered bacteria produce three-fold, four-fold, five-fold, six-fold, seven-fold, eight-fold, nine-fold, ten-fold, fifteen-fold, twenty-fold, thirty-fold, forty-fold, or fifty-fold, more IL-2 than unmodified bacteria of the same bacterial subtype under the same conditions.

[0654] IL-22

[0655] In some embodiments, the genetically engineered bacteria are capable of producing IL-22. Interleukin 22 (IL-22) cytokine can be produced by dendritic cells, lymphoid tissue inducer-like cells, natural killer cells and expressed on adaptive lymphocytes. Through initiation of Jak-STAT signaling pathways, IL-22 expression can trigger expression of antimicrobial compounds as well as a range of cell growth related pathways, both of which enhance tissue repair mechanisms. IL-22 is critical in promoting intestinal barrier fidelity and healing, while modulating inflammatory states. Murine models have demonstrated improved intestinal inflammation states following administration of IL-22. Additionally, IL-22 activates STAT3 signaling to promote enhanced mucus production to preserve barrier function. IL-22's association with IBD susceptibility genes may modulate phenotypic expression of disease as well. In some embodiments, the genetically engineered bacteria comprise a nucleic acid sequence encoding SEQ ID NO: 136 or a functional fragment thereof. In some embodiments, genetically engineered bacteria comprise a nucleic acid sequence that is at least about 80%, at least about 85%, at least about 90%, at least about 95%, or at least about 99% homologous to a nucleic acid sequence encoding SEQ ID NO: 136 or a functional fragment thereof. In some embodiments, the genetically engineered bacteria are capable of producing IL-22 under inducing conditions, e.g., under a condition(s) associated with inflammation. In some embodiments, the genetically engineered bacteria are capable of producing IL-22 in low-oxygen conditions.

TABLE 15
SEQ ID NO: 136

SEQ ID NO: 136
MAALQKSVSS FLMGTLATSC LLLLALLVQG GAAAPISSHC RLDKSNFQQP
YITNRTFMLA KEASLADNNT DVRLIGEKLF HGVSMSERCY LMKQVLNFTL
EEVLFPQSDR FQPYMQEVVP FLARLSNRLS TCHIEGDDLH IQRNVQKLKD
TVKKLGESGE IKAIGELDLL FMSLRNACI

[0656] To improve acetate production, while maintaining high levels of IL-22 secretion, targeted one or more deletions can be introduced in competing metabolic arms of mixed acid fermentation to prevent the production of alternative metabolic fermentative byproducts (thereby increasing acetate production). Non-limiting examples of competing such competing metabolic arms are frdA (converts phosphoenolpyruvate to succinate), ldhA (converts pyruvate to lactate) and adhE (converts Acetyl-CoA to Ethanol). Deletions which may be introduced therefore include deletion of adhE, ldh, and frd. Thus, in certain embodiments, the genetically engineered bacteria comprise one or more gene sequence(s) encoding one or more IL-22 polypeptides for secretion and further comprise mutations and/or deletions in one or more of frdA, ldhA, and adhE.

[0657] In some embodiments, the genetically engineered bacteria comprise one or more gene sequence(s) encoding one or more IL-22-polypeptides for secretion described herein and one or more mutation(s) and/or deletion(s) in one or more genes selected from the ldhA gene, the frdA gene and the adhE gene.

[0658] In some embodiments, the genetically engineered bacteria comprise one or more gene sequence(s) encoding one or more IL-22 polypeptides for secretion and further comprise a mutation and/or deletion in one or more endogenous genes selected from in the ldhA gene, the frdA gene and the adhE genes. In some embodiments, the genetically engineered bacteria comprise one or more gene sequence(s) encoding one or more IL-22 polypeptides for secretion and further comprise a mutation and/or deletion in the endogenous ldhA gene. In some embodiments, the genetically engineered bacteria comprise one or more gene sequence(s) encoding one or more IL-22 polypeptides for secretion and further comprise a mutation and/or deletion in the endogenous adhE gene. In some embodiments, the genetically engineered bacteria comprise one or more gene sequence(s) encoding one or more IL-22 polypeptides for secretion and further comprise a mutation and/or deletion in the endogenous frdA gene. In some embodiments, the genetically engineered bacteria comprise one or more gene sequence(s) encoding one or more IL-22 polypeptides for secretion and further comprise a mutation and/or deletion in the endogenous ldhA and rdA genes. In some embodiments, the genetically engineered bacteria comprise one or more gene sequence(s) encoding one or more IL-22 polypeptides for secretion and further comprise a mutation and/or deletion in the endogenous ldhA genes and adhE genes. In some embodiments, the genetically engineered bacteria comprise one or more gene sequence(s) encoding one or more IL-22 polypeptides for secretion and further comprise a mutation and/or deletion in the endogenous frdA and adhE genes. In some embodiments, the genetically engineered bacteria comprise one or more gene sequence(s) encoding one or more IL-22 polypeptides for secretion and further comprise a mutation and/or deletion in the endogenous ldhA, the frdA, and adhE genes. In some embodiments, the genetically engineered bacteria comprise one or more gene sequence(s) encoding one or more IL-22 polypeptides for secretion and further comprise a mutation and/or deletion in one or more endogenous genes selected from in the ldhA gene, the frdA gene and the adhE genes.

[0659] In some embodiments, the genetically engineered bacteria comprise one or more gene sequence(s) selected from PhoA-IL-22, OmpF-IL-22, and TorA-IL-22 and further comprise a mutation and/or deletion in the endogenous ldhA gene. In some embodiments, the genetically engineered bacteria comprise one or more gene sequence(s) selected from PhoA-IL-22, OmpF-IL-22, and TorA-IL-22 and further comprise a mutation and/or deletion in the endogenous adhE gene. In some embodiments, the genetically engineered bacteria comprise one or more gene sequence(s) selected from PhoA-IL-22, OmpF-IL-22, and TorA-IL-22 and further comprise a mutation and/or deletion in the endogenous frdA gene. In some embodiments, the genetically engineered bacteria comprise one or more gene sequence(s) selected from PhoA-IL-22, OmpF-IL-22, and TorA-IL-22 and further comprise a mutation and/or deletion in the endogenous ldhA and frdA genes. In some embodiments, the genetically engineered bacteria comprise one or more gene sequence(s) selected from PhoA-IL-22, OmpF-IL-22, and TorA-IL-22 and further comprise a mutation and/or deletion in the endogenous ldhA genes and adhE genes. In some embodiments, the genetically engineered bacteria comprise one or more gene sequence(s) selected from PhoA-IL-22, OmpF-IL-22, and TorA-IL-22 and further comprise a mutation and/or deletion in the endogenous frdA and adhE genes. In some embodiments, the genetically engineered bacteria comprise one or more gene sequence(s) selected from PhoA-IL-22, OmpF-IL-22, and TorA-IL-22 and further comprise a mutation and/or deletion in the endogenous ldhA, the frdA, and adhE genes. In some embodiments, the genetically engineered bacteria produce 0% to to 2% to 4%, 4% to 6%, 6% to 8%, 8% to 10%, 10% to 12%, 12% to 14%, 14% to 16%, 16% to 18%, 18% to 20%, 20% to 25%, 25% to 30%, 30% to 35%, 35% to 40%, 40% to 45% 45% to 50%, 50% to 55%, 55% to 60%, 60% to 65%, 65% to 70% to 80%, 80% to 90%, or 90% to 100% more acetate than unmodified bacteria of the same bacterial subtype under the same conditions. In yet another embodiment, the genetically engineered bacteria produce 1.0-1.2-fold, 1.2-1.4-fold, 1.4-1.6-fold, 1.6-1.8-fold, 1.8-2-fold, or two-fold more acetate than unmodified bacteria of the same bacterial subtype under the same conditions. In yet another embodiment, the genetically engineered bacteria produce three-fold, four-fold, five-fold, six-fold, seven-fold, eight-fold, nine-fold, ten-fold, fifteen-fold, twenty-fold, thirty-fold, forty-fold, or fifty-fold, more acetate than unmodified bacteria of the same bacterial subtype under the same conditions.

[0660] In some embodiments, the genetically engineered bacteria produce 0% to 2% to 4%, 4% to 6%, 6% to 8%, 8% to 10%, 10% to 12%, 12% to 14%, 14% to 16%, 16% to 18%, 18% to 20%, 20% to 25%, 25% to 30%, 30% to 35%, 35% to 40%, 40% to 45% 45% to 50%, 50% to 55%, 55% to 60%, 60% to 65%, 65% to 70% to 80%, 80% to 90%, or 90% to 100% more IL-22 than unmodified bacteria of the same bacterial subtype under the same conditions. In yet another embodiment, the genetically engineered bacteria produce 1.0-1.2-fold, 1.2-1.4-fold, 1.4-1.6-fold, 1.6-1.8-fold, 1.8-2-fold, or two-fold more IL-22 than unmodified bacteria of the same bacterial subtype under the same conditions. In yet another embodiment, the genetically engineered bacteria produce three-fold, four-fold, five-fold, six-fold, seven-fold, eight-fold, nine-fold, ten-fold, fifteen-fold, twenty-fold, thirty-fold, forty-fold, or fifty-fold, more IL-22 than unmodified bacteria of the same bacterial subtype under the same conditions.

[0661] In certain situations, the need may arise to prevent and/or reduce acetate production by of an engineered or naturally occurring strain, e.g., E. coli Nissle, while maintaining high levels of IL-22 secretion. Without wishing to be bound by theory, one or more mutations and/or deletions in one or more gene(s) encoding in one or more enzymes which function in the acetate producing metabolic arm of fermentation should reduce and/or prevent production of acetate. A non-limiting example of such an enzyme is phosphate acetyltransferase (Pta), which is the first enzyme in the metabolic arm converting acetyl-CoA to acetate. Deletion and/or mutation of the Pta gene or a gene encoding another enzyme in this metabolic arm may also allow for more acetyl-CoA to be used for IL-22 secretion. Additionally, one or more mutations preventing or reducing the flow through other metabolic arms of mixed acid fermentation, such as those which produce succinate, lactate, and/or ethanol can increase the production of acetyl-CoA, which is available for IL-22 synthesis. Such mutations and/or deletions, include but are not limited to mutations and/or deletions in the frdA, ldhA, and/or adhE genes.

[0662] In some embodiments, the genetically engineered bacteria comprise one or more gene sequence(s) encoding one or more IL-22 polypeptides for secretion and further comprise a mutation and/or deletion in the endogenous pta gene. In some embodiments, the genetically engineered bacteria comprise one or more gene sequence(s) encoding one or more IL-22 polypeptides for secretion and further comprise a mutation and/or deletion in the endogenous pta gene and in one or more endogenous genes selected from in the ldhA gene, the frdA gene and the adhE gene. In some embodiments, the genetically engineered bacteria comprise one or more gene sequence(s) encoding one or more IL-22 polypeptides for secretion and further comprise a mutation in the endogenous pta and adhE genes. In some embodiments, the genetically engineered bacteria comprise one or more gene sequence(s) encoding one or more IL-22 polypeptides for secretion and further comprise a mutation in the endogenous pta and ldhA genes. In some embodiments, the genetically engineered bacteria comprise one or more gene sequence(s) encoding one or more IL-22 polypeptides for secretion and further comprise a mutation in the endogenous pta and frdA genes. In some embodiments, the genetically engineered bacteria comprise one or more gene sequence(s) encoding one or more IL-22 polypeptides for secretion and further comprise a mutation and/or deletion in the endogenous pta, ldhA and frdA genes. In some embodiments, the genetically engineered bacteria comprise one or more gene sequence(s) encoding one or more IL-22 polypeptides for secretion and further comprise a mutation in the endogenous pta, ldhA, and adhE genes. In some embodiments, the genetically engineered bacteria comprise one or more gene sequence(s) encoding one or more IL-22 polypeptides for secretion and further comprise a mutation in the endogenous pta, frdA and adhE genes. In some embodiments, the genetically engineered bacteria comprise one or more gene sequence(s) encoding one or IL-22 polypeptides for secretion and further comprise a mutation and/or deletion in the endogenous pta, ldhA, frdA, and adhE genes.

[0663] In some embodiments, the genetically engineered bacteria comprise one or more gene sequence(s) selected from PhoA-IL-22, OmpF-IL-22, and TorA-IL-22 and further comprise a mutation and/or deletion in the endogenous pta gene. In some embodiments, the genetically engineered bacteria comprise one or more gene sequence(s) selected from PhoA-IL-22, OmpF-IL-22, and TorA-IL-22 and further comprise a mutation and/or deletion in the endogenous pta gene and in one or more endogenous genes selected from in the ldhA gene, the frdA gene and the adhE gene. In some embodiments, the genetically engineered bacteria comprise one or more gene sequence(s) selected from PhoA-IL-22, OmpF-IL-22, and TorA-IL-22 and further comprise a mutation in the endogenous pta and adhE genes. In some embodiments, the genetically engineered bacteria comprise one or more gene sequence(s) selected from PhoA-IL-22, OmpF-IL-22, and TorA-IL-22 and further comprise a mutation in the endogenous pta and ldhA genes.

[0664] In some embodiments, the genetically engineered bacteria comprise one or more gene sequence(s) selected from PhoA-IL-22, OmpF-IL-22, and TorA-IL-22 and further comprise a mutation in the endogenous pta and frdA genes. In some embodiments, the genetically engineered bacteria comprise one or more gene sequence(s) selected from PhoA-IL-22, OmpF-IL-22, and TorA-IL-22 and further comprise a mutation and/or deletion in the endogenous pta, ldhA and frdA genes. In some embodiments, the genetically engineered bacteria comprise one or more gene sequence(s) selected from PhoA-IL-22, OmpF-IL-22, and TorA-IL-22 and further comprise a mutation in the endogenous pta, ldhA, and adhE genes. In some embodiments, the genetically engineered bacteria comprise one or more gene sequence(s) selected from PhoA-IL-22, OmpF-IL-22, and TorA-IL-22 and further comprise a mutation in the endogenous pta, frdA and adhE genes. In some embodiments, the genetically engineered bacteria comprise one or more gene sequence(s) selected from PhoA-IL-22, OmpF-IL-22, and TorA-IL-22 and further comprise a mutation in the endogenous pta, ldhA, frdA, and adhE genes

[0665] In some embodiments, the genetically engineered bacteria produce 0% to to 2% to 4%, 4% to 6%, 6% to 8%, 8% to 10%, 10% to 12%, 12% to 14%, 14% to 16%, 16% to 18%, 18% to 20%, 20% to 25%, 25% to 30%, 30% to 35%, 35% to 40%, 40% to 45% 45% to 50%, 50% to 55%, 55% to 60%, 60% to 65%, 65% to 70% to 80%, 80% to 90%, or 90% to 100% less acetate than unmodified bacteria of the same bacterial subtype under the same conditions. In yet another embodiment, the genetically engineered bacteria produce 1.0-1.2-fold, 1.2-1.4-fold, 1.4-1.6-fold, 1.6-1.8-fold, 1.8-2-fold, or two-fold less acetate than unmodified bacteria of the same bacterial subtype under the same conditions. In yet another embodiment, the the genetically engineered bacteria produce three-fold, four-fold, five-fold, six-fold, seven-fold, eight-fold, nine-fold, ten-fold, fifteen-fold, twenty-fold, thirty-fold, forty-fold, or fifty-fold, less acetate than unmodified bacteria of the same bacterial subtype under the same conditions.

[0666] In some embodiments, the genetically engineered bacteria produce 0% to to 2% to 4%, 4% to 6%, 6% to 8%, 8% to 10%, 10% to 12%, 12% to 14%, 14% to 16%, 16% to 18%, 18% to 20%, 20% to 25%, 25% to 30%, 30% to 35%, 35% to 40%, 40% to 45% 45% to 50%, 50% to 55%, 55% to 60%, 60% to 65%, 65% to 70% to 80%, 80% to 90%, or 90% to 100% more IL-22 than unmodified bacteria of the same bacterial subtype under the same conditions. In yet another embodiment, the genetically engineered bacteria produce 1.0-1.2-fold, 1.2-1.4-fold, 1.4-1.6-fold, 1.6-1.8-fold, 1.8-2-fold, or two-fold more IL-22 than unmodified bacteria of the same bacterial subtype under the same conditions. In yet another embodiment, the the genetically engineered bacteria produce three-fold, four-fold, five-fold, six-fold, seven-fold, eight-fold, nine-fold, ten-fold, fifteen-fold, twenty-fold, thirty-fold, forty-fold, or fifty-fold, more IL-22 than unmodified bacteria of the same bacterial subtype under the same conditions.

[0667] IL-27

[0668] In some embodiments, the genetically engineered bacteria are capable of producing IL-27. Interleukin 27 (IL-27) cytokine is predominately expressed by activated antigen presenting cells, while IL-27 receptor is found on a range of cells including T cells, NK cells, among others. In particular, IL-27 suppresses development of pro-inflammatory T helper 17 (Th17) cells, which play a critical role in IBD pathogenesis. Further, IL-27 can promote differentiation of IL-10 producing Tr1 cells and enhance IL-10 output, both of which have anti-inflammatory effects. IL-27 has protective effects on epithelial barrier function via activation of MAPK and STAT signaling within intestinal epithelial cells. Additionally, IL-27 enhances production of antibacterial proteins that curb bacterial growth. Improvement in barrier function and reduction in bacterial growth suggest a favorable role for IL-27 in IBD pathogenesis. In some embodiments, the genetically engineered bacteria comprise a nucleic acid sequence encoding SEQ ID NO: 137 or a functional fragment thereof. In some embodiments, genetically engineered bacteria comprise a nucleic acid sequence that is at least about 80%, at least about 85%, at least about 90%, at least about 95%, or at least about 99% homologous to a nucleic acid sequence encoding SEQ ID NO: 137 or a functional fragment thereof. In some embodiments, the genetically engineered bacteria are capable of producing IL-27 under inducing conditions, e.g., under a condition(s) associated with inflammation. In some embodiments, the genetically engineered bacteria are capable of producing IL-27 in low-oxygen conditions.

TABLE 16
SEQ ID NO: 137

SEQ ID NO: 137
MGQTAGDLGW RLSLLLLPLL LVQAGVWGFP RPPGRPQLSL QELRREFTVS
LHLARKLLSE VRGQAHRFAE SHLPGVNLYL LPLGEQLPDV SLTFQAWRRL
SDPERLCFIS TTLQPFHALL GGLGTQGRWT NMERMQLWAM RLDLRDLQRH
LRFQVLAAGF NLPEEEEEEE EEEEEERKGL LPGALGSALQ GPAQVSWPQL
LSTYRLLHSL ELVLSRAVRE LLLLSKAGHS VWPLGFPTLS PQP

[0669] To improve acetate production, while maintaining high levels of IL-27 secretion, targeted one or more deletions can be introduced in competing metabolic arms of mixed acid fermentation to prevent the production of alternative metabolic fermentative byproducts (thereby increasing acetate production). Non-limiting examples of competing such competing metabolic arms are frdA (converts phosphoenolpyruvate to succinate), ldhA (converts pyruvate to lactate) and adhE (converts Acetyl-CoA to Ethanol). Deletions which may be introduced therefore include deletion of adhE, ldh, and frd. Thus, in certain embodiments, the genetically engineered bacteria comprise one or more gene sequence(s) encoding one or more IL-27 polypeptides for secretion and further comprise mutations and/or deletions in one or more of frdA, ldhA, and adhE.

[0670] In some embodiments, the genetically engineered bacteria comprise one or more gene sequence(s) encoding one or more IL-27-polypeptides for secretion described herein and one or more mutation(s) and/or deletion(s) in one or more genes selected from the ldhA gene, the frdA gene and the adhE gene.

[0671] In some embodiments, the genetically engineered bacteria comprise one or more gene sequence(s) encoding one or more IL-27 polypeptides for secretion and further comprise a mutation and/or deletion in one or more endogenous genes selected from in the ldhA gene, the frdA gene and the adhE genes. In some embodiments, the genetically engineered bacteria comprise one or more gene sequence(s) encoding one or more IL-27 polypeptides for secretion and further comprise a mutation and/or deletion in the endogenous ldhA gene. In some embodiments, the genetically engineered bacteria comprise one or more gene sequence(s) encoding one or more IL-27 polypeptides for secretion and further comprise a mutation and/or deletion in the endogenous adhE gene. In some embodiments, the genetically engineered bacteria comprise one or more gene sequence(s) encoding one or more IL-27 polypeptides for secretion and further comprise a mutation and/or deletion in the endogenous frdA gene. In some embodiments, the genetically engineered bacteria comprise one or more gene sequence(s) encoding one or more IL-27 polypeptides for secretion and further comprise a mutation and/or deletion in the endogenous ldhA and rdA genes. In some embodiments, the genetically engineered bacteria comprise one or more gene sequence(s) encoding one or more IL-27 polypeptides for secretion and further comprise a mutation and/or deletion in the endogenous ldhA genes and adhE genes. In some embodiments, the genetically engineered bacteria comprise one or more gene sequence(s) encoding one or more IL-27 polypeptides for secretion and further comprise a mutation and/or deletion in the endogenous frdA and adhE genes. In some embodiments, the genetically engineered bacteria comprise one or more gene sequence(s) encoding one or more IL-27 polypeptides for secretion and further comprise a mutation and/or deletion in the endogenous ldhA, the frdA, and adhE genes. In some embodiments, the genetically engineered bacteria comprise one or more gene sequence(s) encoding one or more IL-27 polypeptides for secretion and further comprise a mutation and/or deletion in one or more endogenous genes selected from in the ldhA gene, the frdA gene and the adhE genes.

[0672] In some embodiments, the genetically engineered bacteria comprise one or more gene sequence(s) selected from PhoA-IL-27, OmpF-IL-27, and TorA-IL-27 and further comprise a mutation and/or deletion in the endogenous ldhA gene. In some embodiments, the genetically engineered bacteria comprise one or more gene sequence(s) selected from PhoA-IL-27, OmpF-IL-27, and TorA-IL-27 and further comprise a mutation and/or deletion in the endogenous adhE gene. In some embodiments, the genetically engineered bacteria comprise one or more gene sequence(s) selected from PhoA-IL-27, OmpF-IL-27, and TorA-IL-27 and further comprise a mutation and/or deletion in the endogenous frdA gene. In some embodiments, the genetically engineered bacteria comprise one or more gene sequence(s) selected from PhoA-IL-27, OmpF-IL-27, and TorA-IL-27 and further comprise a mutation and/or deletion in the endogenous ldhA and frdA genes. In some embodiments, the genetically engineered bacteria comprise one or more gene sequence(s) selected from PhoA-IL-27, OmpF-IL-27, and TorA-IL-27 and further comprise a mutation and/or deletion in the endogenous ldhA genes and adhE genes. In some embodiments, the genetically engineered bacteria comprise one or more gene sequence(s) selected from PhoA-IL-27, OmpF-IL-27, and TorA-IL-27 and further comprise a mutation and/or deletion in the endogenous frdA and adhE genes. In some embodiments, the genetically engineered bacteria comprise one or more gene sequence(s) selected from PhoA-IL-27, OmpF-IL-27, and TorA-IL-27 and further comprise a mutation and/or deletion in the endogenous ldhA, the frdA, and adhE genes. In some embodiments, the genetically engineered bacteria produce 0% to to 2% to 4%, 4% to 6%, 6% to 8%, 8% to 10%, 10% to 12%, 12% to 14%, 14% to 16%, 16% to 18%, 18% to 20%, 20% to 25%, 25% to 30%, 30% to 35%, 35% to 40%, 40% to 45% 45% to 50%, 50% to 55%, 55% to 60%, 60% to 65%, 65% to 70% to 80%, 80% to 90%, or 90% to 100% more acetate than unmodified bacteria of the same bacterial subtype under the same conditions. In yet another embodiment, the genetically engineered bacteria produce 1.0-1.2-fold, 1.2-1.4-fold, 1.4-1.6-fold, 1.6-1.8-fold, 1.8-2-fold, or two-fold more acetate than unmodified bacteria of the same bacterial subtype under the same conditions. In yet another embodiment, the genetically engineered bacteria produce three-fold, four-fold, five-fold, six-fold, seven-fold, eight-fold, nine-fold, ten-fold, fifteen-fold, twenty-fold, thirty-fold, forty-fold, or fifty-fold, more acetate than unmodified bacteria of the same bacterial subtype under the same conditions.

[0673] In some embodiments, the genetically engineered bacteria produce 0% to 2% to 4%, 4% to 6%, 6% to 8%, 8% to 10%, 10% to 12%, 12% to 14%, 14% to 16%, 16% to 18%, 18% to 20%, 20% to 25%, 25% to 30%, 30% to 35%, 35% to 40%, 40% to 45% 45% to 50%, 50% to 55%, 55% to 60%, 60% to 65%, 65% to 70% to 80%, 80% to 90%, or 90% to 100% more IL-27 than unmodified bacteria of the same bacterial subtype under the same conditions. In yet another embodiment, the genetically engineered bacteria produce 1.0-1.2-fold, 1.2-1.4-fold, 1.4-1.6-fold, 1.6-1.8-fold, 1.8-2-fold, or two-fold more IL-27 than unmodified bacteria of the same bacterial subtype under the same conditions. In yet another embodiment, the genetically engineered bacteria produce three-fold, four-fold, five-fold, six-fold, seven-fold, eight-fold, nine-fold, ten-fold, fifteen-fold, twenty-fold, thirty-fold, forty-fold, or fifty-fold, more IL-27 than unmodified bacteria of the same bacterial subtype under the same conditions.

[0674] In certain situations, the need may arise to prevent and/or reduce acetate production by of an engineered or naturally occurring strain, e.g., E. coli Nissle, while maintaining high levels of IL-27 secretion. Without wishing to be bound by theory, one or more mutations and/or deletions in one or more gene(s) encoding in one or more enzymes which function in the acetate producing metabolic arm of fermentation should reduce and/or prevent production of acetate. A non-limiting example of such an enzyme is phosphate acetyltransferase (Pta), which is the first enzyme in the metabolic arm converting acetyl-CoA to acetate. Deletion and/or mutation of the Pta gene or a gene encoding another enzyme in this metabolic arm may also allow for more acetyl-CoA to be used for IL-27 secretion. Additionally, one or more mutations preventing or reducing the flow through other metabolic arms of mixed acid fermentation, such as those which produce succinate, lactate, and/or ethanol can increase the production of acetyl-CoA, which is available for IL-27 synthesis. Such mutations and/or deletions, include but are not limited to mutations and/or deletions in the frdA, ldhA, and/or adhE genes.

[0675] In some embodiments, the genetically engineered bacteria comprise one or more gene sequence(s) encoding one or more IL-27 polypeptides for secretion and further comprise a mutation and/or deletion in the endogenous pta gene. In some embodiments, the genetically engineered bacteria comprise one or more gene sequence(s) encoding one or more IL-27 polypeptides for secretion and further comprise a mutation and/or deletion in the endogenous pta gene and in one or more endogenous genes selected from in the ldhA gene, the frdA gene and the adhE gene. In some embodiments, the genetically engineered bacteria comprise one or more gene sequence(s) encoding one or more IL-27 polypeptides for secretion and further comprise a mutation in the endogenous pta and adhE genes. In some embodiments, the genetically engineered bacteria comprise one or more gene sequence(s) encoding one or more IL-27 polypeptides for secretion and further comprise a mutation in the endogenous pta and ldhA genes. In some embodiments, the genetically engineered bacteria comprise one or more gene sequence(s) encoding one or more IL-27 polypeptides for secretion and further comprise a mutation in the endogenous pta and frdA genes. In some embodiments, the genetically engineered bacteria comprise one or more gene sequence(s) encoding one or more IL-27 polypeptides for secretion and further comprise a mutation and/or deletion in the endogenous pta, ldhA and frdA genes. In some embodiments, the genetically engineered bacteria comprise one or more gene sequence(s) encoding one or more IL-27 polypeptides for secretion and further comprise a mutation in the endogenous pta, ldhA, and adhE genes. In some embodiments, the genetically engineered bacteria comprise one or more gene sequence(s) encoding one or more IL-27 polypeptides for secretion and further comprise a mutation in the endogenous pta, frdA and adhE genes. In some embodiments, the genetically engineered bacteria comprise one or more gene sequence(s) encoding one or IL-27 polypeptides for secretion and further comprise a mutation and/or deletion in the endogenous pta, ldhA, frdA, and adhE genes.

[0676] In some embodiments, the genetically engineered bacteria comprise one or more gene sequence(s) selected from PhoA-IL-27, OmpF-IL-27, and TorA-IL-27 and further comprise a mutation and/or deletion in the endogenous pta gene. In some embodiments, the genetically engineered bacteria comprise one or more gene sequence(s) selected from PhoA-IL-27, OmpF-IL-27, and TorA-IL-27 and further comprise a mutation and/or deletion in the endogenous pta gene and in one or more endogenous genes selected from in the ldhA gene, the frdA gene and the adhE gene. In some embodiments, the genetically engineered bacteria comprise one or more gene sequence(s) selected from PhoA-IL-27, OmpF-IL-27, and TorA-IL-27 and further comprise a mutation in the endogenous pta and adhE genes. In some embodiments, the genetically engineered bacteria comprise one or more gene sequence(s) selected from PhoA-IL-27, OmpF-IL-27, and TorA-IL-27 and further comprise a mutation in the endogenous pta and ldhA genes.

[0677] In some embodiments, the genetically engineered bacteria comprise one or more gene sequence(s) selected from PhoA-IL-27, OmpF-IL-27, and TorA-IL-27 and further comprise a mutation in the endogenous pta and frdA genes. In some embodiments, the genetically engineered bacteria comprise one or more gene sequence(s) selected from PhoA-IL-27, OmpF-IL-27, and TorA-IL-27 and further comprise a mutation and/or deletion in the endogenous pta, ldhA and frdA genes. In some embodiments, the genetically engineered bacteria comprise one or more gene sequence(s) selected from PhoA-IL-27, OmpF-IL-27, and TorA-IL-27 and further comprise a mutation in the endogenous pta, ldhA, and adhE genes. In some embodiments, the genetically engineered bacteria comprise one or more gene sequence(s) selected from PhoA-IL-27, OmpF-IL-27, and TorA-IL-27 and further comprise a mutation in the endogenous pta, frdA and adhE genes. In some embodiments, the genetically engineered bacteria comprise one or more gene sequence(s) selected from PhoA-IL-27, OmpF-IL-27, and TorA-IL-27 and further comprise a mutation in the endogenous pta, ldhA, frdA, and adhE genes

[0678] In some embodiments, the genetically engineered bacteria produce 0% to to 2% to 4%, 4% to 6%, 6% to 8%, 8% to 10%, 10% to 12%, 12% to 14%, 14% to 16%, 16% to 18%, 18% to 20%, 20% to 25%, 25% to 30%, 30% to 35%, 35% to 40%, 40% to 45% 45% to 50%, 50% to 55%, 55% to 60%, 60% to 65%, 65% to 70% to 80%, 80% to 90%, or 90% to 100% less acetate than unmodified bacteria of the same bacterial subtype under the same conditions. In yet another embodiment, the genetically engineered bacteria produce 1.0-1.2-fold, 1.2-1.4-fold, 1.4-1.6-fold, 1.6-1.8-fold, 1.8-2-fold, or two-fold less acetate than unmodified bacteria of the same bacterial subtype under the same conditions. In yet another embodiment, the the genetically engineered bacteria produce three-fold, four-fold, five-fold, six-fold, seven-fold, eight-fold, nine-fold, ten-fold, fifteen-fold, twenty-fold, thirty-fold, forty-fold, or fifty-fold, less acetate than unmodified bacteria of the same bacterial subtype under the same conditions.

[0679] In some embodiments, the genetically engineered bacteria produce 0% to to 2% to 4%, 4% to 6%, 6% to 8%, 8% to 10%, 10% to 12%, 12% to 14%, 14% to 16%, 16% to 18%, 18% to 20%, 20% to 25%, 25% to 30%, 30% to 35%, 35% to 40%, 40% to 45% 45% to 50%, 50% to 55%, 55% to 60%, 60% to 65%, 65% to 70% to 80%, 80% to 90%, or 90% to 100% more IL-27 than unmodified bacteria of the same bacterial subtype under the same conditions. In yet another embodiment, the genetically engineered bacteria produce 1.0-1.2-fold, 1.2-1.4-fold, 1.4-1.6-fold, 1.6-1.8-fold, 1.8-2-fold, or two-fold more IL-27 than unmodified bacteria of the same bacterial subtype under the same conditions. In yet another embodiment, the the genetically engineered bacteria produce three-fold, four-fold, five-fold, six-fold, seven-fold, eight-fold, nine-fold, ten-fold, fifteen-fold, twenty-fold, thirty-fold, forty-fold, or fifty-fold, more IL-27 than unmodified bacteria of the same bacterial subtype under the same conditions.

[0680] SOD

[0681] In some embodiments, the genetically engineered bacteria of the invention are capable of producing SOD. Increased ROS levels contribute to pathophysiology of inflammatory bowel disease. Increased ROS levels may lead to enhanced expression of vascular cell adhesion molecule 1 (VCAM-1), which can facilitate translocation of inflammatory mediators to disease affected tissue, and result in a greater degree of inflammatory burden. Antioxidant systems including superoxide dismutase (SOD) can function to mitigate overall ROS burden. However, studies indicate that the expression of SOD in the setting of IBD may be compromised, e.g., produced at lower levels in IBD, thus allowing disease pathology to proceed. Further studies have shown that supplementation with SOD to rats within a colitis model is associated with reduced colonic lipid peroxidation and endothelial VCAM-1 expression as well as overall improvement in inflammatory environment. Thus, in some embodiments, the genetically engineered bacteria comprise a nucleic acid sequence encoding SEQ ID NO: 138 or a functional fragment thereof. In some embodiments, genetically engineered bacteria comprise a nucleic acid sequence that is at least about 80%, at least about 85%, at least about 90%, at least about 95%, or at least about 99% homologous to a nucleic acid sequence encoding SEQ ID NO: 138 or a functional fragment thereof. In some embodiments, the genetically engineered bacteria are capable of producing SOD under inducing conditions, e.g., under a condition(s) associated with inflammation. In some embodiments, the genetically engineered bacteria are capable of producing SOD in low-oxygen conditions.

TABLE 17
SEQ ID NO: 138

SEQ ID NO: 138
MATKAVCVLK GDGPVQGIIN FEQKESNGPV KVWGSIKGLT EGLHGFHVHE
FGDNTAGCTS AGPHFNPLSR KHGGPKDEER HVGDLGNVTA DKDGVADVSI
EDSVISLSGD HCIIGRTLVV HEKADDLGKG GNEESTKTGN AGSRLACGVI
GIAQ

[0682] GLP2

[0683] In some embodiments, the genetically engineered bacteria are capable of producing GLP-2 or proglucagon. Glucagon-like peptide 2 (GLP-2) is produced by intestinal endocrine cells and stimulates intestinal growth and enhances gut barrier function. GLP-2 administration has therapeutic potential in treating IBD, short bowel syndrome, and small bowel enteritis (Yazbeck et al., 2009). The genetically engineered bacteria may comprise any suitable gene encoding GLP-2 or proglucagon, e.g., human GLP-2 or proglucagon. In some embodiments, a protease inhibitor, e.g., an inhibitor of dipeptidyl peptidase, is also administered to decrease GLP-2 degradation. In some embodiments, the genetically engineered bacteria express a degradation resistant GLP-2 analog, e.g., Teduglutide (Yazbeck et al., 2009). In some embodiments, the gene encoding GLP-2 or proglucagon is modified and/or mutated, e.g., to enhance stability, increase GLP-2 production, and/or increase gut barrier enhancing potency under inducing conditions. In some embodiments, the genetically engineered bacteria of the invention are capable of producing GLP-2 or proglucagon under inducing conditions. GLP-2 administration in a murine model of IBD is associated with reduced mucosal damage and inflammation, as well as a reduction in inflammatory mediators, such as TNF-α and IFN-y. Further, GLP-2 supplementation may also lead to reduced mucosal myeloperoxidase in colitis/ileitis models. In some embodiments, the genetically engineered bacteria comprise a nucleic acid sequence encoding SEQ ID NO: 139 or a functional fragment thereof. In some embodiments, genetically engineered bacteria comprise a nucleic acid sequence that is at least about 80%, at least about 85%, at least about 90%, at least about 95%, or at least about 99% homologous to a nucleic acid sequence encoding SEQ ID NO: 139 or a functional fragment thereof. In some embodiments, the genetically engineered bacteria are capable of producing GLP-2 under inducing conditions, e.g., under a condition(s) associated with inflammation. In some embodiments, the genetically engineered bacteria are capable of producing GLP-2 in low-oxygen conditions.

TABLE 18
SEQ ID NO: 139 GLP-2

SEQ ID NO: 139
HADGSFSDEMNTILDNLAARDFINWLIQTKITD

[0684] In some embodiments, the genetically engineered bacteria are capable of producing GLP-2 analogs, including but not limited to, Gattex and teduglutide. Teduglutide is a protease resistant analog of GLP-2. It is made up of 33 amino acids and differs from GLP-2 by one amino acid (alanine is substituted by glycine). The significance of this substitution is that teduglutide is longer acting than endogenous GLP-2 as it is more resistant to proteolysis from dipeptidyl peptidase-4.

TABLE 19
SEQ ID NO: 140 Teduglutide\

SEQ ID NO: 140
HGDGSFSDEMNTILDNLAARDFINWLIQTKITD

[0685] In some embodiments, the genetically engineered bacteria comprise a nucleic acid sequence encoding SEQ ID NO: 140 or a functional fragment thereof. In some embodiments, genetically engineered bacteria comprise a nucleic acid sequence that is at least about 80%, at least about 85%, at least about 90%, at least about 95%, or at least about 99% homologous to a nucleic acid sequence encoding SEQ ID NO: 140 or a functional fragment thereof. In some embodiments, the genetically engineered bacteria are capable of producing Teduglutide under inducing conditions, e.g., under a condition(s) associated with inflammation. In some embodiments, the genetically engineered bacteria are capable of producing Teduglutide in low-oxygen conditions.

[0686] To improve acetate production, while maintaining high levels of GLP-2 secretion, targeted one or more deletions can be introduced in competing metabolic arms of mixed acid fermentation to prevent the production of alternative metabolic fermentative byproducts (thereby increasing acetate production). Non-limiting examples of competing such competing metabolic arms are frdA (converts phosphoenolpyruvate to succinate), ldhA (converts pyruvate to lactate) and adhE (converts Acetyl-CoA to Ethanol). Deletions which may be introduced therefore include deletion of adhE, ldh, and frd. Thus, in certain embodiments, the genetically engineered bacteria comprise one or more gene sequence(s) encoding one or more GLP-2 polypeptides for secretion and further comprise mutations and/or deletions in one or more of frdA, ldhA, and adhE.

[0687] In some embodiments, the genetically engineered bacteria comprise one or more gene sequence(s) encoding one or more GLP-2-polypeptides for secretion described herein and one or more mutation(s) and/or deletion(s) in one or more genes selected from the ldhA gene, the frdA gene and the adhE gene.

[0688] In some embodiments, the genetically engineered bacteria comprise one or more gene sequence(s) encoding one or more GLP-2 polypeptides for secretion and further comprise a mutation and/or deletion in one or more endogenous genes selected from in the ldhA gene, the frdA gene and the adhE genes. In some embodiments, the genetically engineered bacteria comprise one or more gene sequence(s) encoding one or more GLP-2 polypeptides for secretion and further comprise a mutation and/or deletion in the endogenous ldhA gene. In some embodiments, the genetically engineered bacteria comprise one or more gene sequence(s) encoding one or more GLP-2 polypeptides for secretion and further comprise a mutation and/or deletion in the endogenous adhE gene. In some embodiments, the genetically engineered bacteria comprise one or more gene sequence(s) encoding one or more GLP-2 polypeptides for secretion and further comprise a mutation and/or deletion in the endogenous frdA gene. In some embodiments, the genetically engineered bacteria comprise one or more gene sequence(s) encoding one or more GLP-2 polypeptides for secretion and further comprise a mutation and/or deletion in the endogenous ldhA and rdA genes. In some embodiments, the genetically engineered bacteria comprise one or more gene sequence(s) encoding one or more GLP-2 polypeptides for secretion and further comprise a mutation and/or deletion in the endogenous ldhA genes and adhE genes. In some embodiments, the genetically engineered bacteria comprise one or more gene sequence(s) encoding one or more GLP-2 polypeptides for secretion and further comprise a mutation and/or deletion in the endogenous frdA and adhE genes. In some embodiments, the genetically engineered bacteria comprise one or more gene sequence(s) encoding one or more GLP-2 polypeptides for secretion and further comprise a mutation and/or deletion in the endogenous ldhA, the frdA, and adhE genes. In some embodiments, the genetically engineered bacteria comprise one or more gene sequence(s) encoding one or more GLP-2 polypeptides for secretion and further comprise a mutation and/or deletion in one or more endogenous genes selected from in the ldhA gene, the frdA gene and the adhE genes.

[0689] In some embodiments, the genetically engineered bacteria comprise one or more gene sequence(s) selected from PhoA-GLP-2, OmpF-GLP-2, and TorA-GLP-2 and further comprise a mutation and/or deletion in the endogenous ldhA gene. In some embodiments, the genetically engineered bacteria comprise one or more gene sequence(s) selected from PhoA-GLP-2, OmpF-GLP-2, and TorA-GLP-2 and further comprise a mutation and/or deletion in the endogenous adhE gene. In some embodiments, the genetically engineered bacteria comprise one or more gene sequence(s) selected from PhoA-GLP-2, OmpF-GLP-2, and TorA-GLP-2 and further comprise a mutation and/or deletion in the endogenous frdA gene. In some embodiments, the genetically engineered bacteria comprise one or more gene sequence(s) selected from PhoA-GLP-2, OmpF-GLP-2, and TorA-GLP-2 and further comprise a mutation and/or deletion in the endogenous ldhA and frdA genes. In some embodiments, the genetically engineered bacteria comprise one or more gene sequence(s) selected from PhoA-GLP-2, OmpF-GLP-2, and TorA-GLP-2 and further comprise a mutation and/or deletion in the endogenous ldhA genes and adhE genes. In some embodiments, the genetically engineered bacteria comprise one or more gene sequence(s) selected from PhoA-GLP-2, OmpF-GLP-2, and TorA-GLP-2 and further comprise a mutation and/or deletion in the endogenous frdA and adhE genes. In some embodiments, the genetically engineered bacteria comprise one or more gene sequence(s) selected from PhoA-GLP-2, OmpF-GLP-2, and TorA-GLP-2 and further comprise a mutation and/or deletion in the endogenous ldhA, the frdA, and adhE genes. In some embodiments, the genetically engineered bacteria produce 0% to to 2% to 4%, 4% to 6%, 6% to 8%, 8% to 10%, 10% to 12%, 12% to 14%, 14% to 16%, 16% to 18%, 18% to 20%, 20% to 25%, 25% to 30%, 30% to 35%, 35% to 40%, 40% to 45% 45% to 50%, 50% to 55%, 55% to 60%, 60% to 65%, 65% to 70% to 80%, 80% to 90%, or 90% to 100% more acetate than unmodified bacteria of the same bacterial subtype under the same conditions. In yet another embodiment, the genetically engineered bacteria produce 1.0-1.2-fold, 1.2-1.4-fold, 1.4-1.6-fold, 1.6-1.8-fold, 1.8-2-fold, or two-fold more acetate than unmodified bacteria of the same bacterial subtype under the same conditions. In yet another embodiment, the genetically engineered bacteria produce three-fold, four-fold, five-fold, six-fold, seven-fold, eight-fold, nine-fold, ten-fold, fifteen-fold, twenty-fold, thirty-fold, forty-fold, or fifty-fold, more acetate than unmodified bacteria of the same bacterial subtype under the same conditions.

[0690] In some embodiments, the genetically engineered bacteria produce 0% to 2% to 4%, 4% to 6%, 6% to 8%, 8% to 10%, 10% to 12%, 12% to 14%, 14% to 16%, 16% to 18%, 18% to 20%, 20% to 25%, 25% to 30%, 30% to 35%, 35% to 40%, 40% to 45% 45% to 50%, 50% to 55%, 55% to 60%, 60% to 65%, 65% to 70% to 80%, 80% to 90%, or 90% to 100% more GLP-2 than unmodified bacteria of the same bacterial subtype under the same conditions. In yet another embodiment, the genetically engineered bacteria produce 1.0-1.2-fold, 1.2-1.4-fold, 1.4-1.6-fold, 1.6-1.8-fold, 1.8-2-fold, or two-fold more GLP-2 than unmodified bacteria of the same bacterial subtype under the same conditions. In yet another embodiment, the genetically engineered bacteria produce three-fold, four-fold, five-fold, six-fold, seven-fold, eight-fold, nine-fold, ten-fold, fifteen-fold, twenty-fold, thirty-fold, forty-fold, or fifty-fold, more GLP-2 than unmodified bacteria of the same bacterial subtype under the same conditions.

[0691] In certain situations, the need may arise to prevent and/or reduce acetate production by of an engineered or naturally occurring strain, e.g., E. coli Nissle, while maintaining high levels of GLP-2 secretion. Without wishing to be bound by theory, one or more mutations and/or deletions in one or more gene(s) encoding in one or more enzymes which function in the acetate producing metabolic arm of fermentation should reduce and/or prevent production of acetate. A non-limiting example of such an enzyme is phosphate acetyltransferase (Pta), which is the first enzyme in the metabolic arm converting acetyl-CoA to acetate. Deletion and/or mutation of the Pta gene or a gene encoding another enzyme in this metabolic arm may also allow for more acetyl-CoA to be used for GLP-2 secretion. Additionally, one or more mutations preventing or reducing the flow through other metabolic arms of mixed acid fermentation, such as those which produce succinate, lactate, and/or ethanol can increase the production of acetyl-CoA, which is available for GLP-2 synthesis. Such mutations and/or deletions, include but are not limited to mutations and/or deletions in the frdA, ldhA, and/or adhE genes.

[0692] In some embodiments, the genetically engineered bacteria comprise one or more gene sequence(s) encoding one or more GLP-2 polypeptides for secretion and further comprise a mutation and/or deletion in the endogenous pta gene. In some embodiments, the genetically engineered bacteria comprise one or more gene sequence(s) encoding one or more GLP-2 polypeptides for secretion and further comprise a mutation and/or deletion in the endogenous pta gene and in one or more endogenous genes selected from in the ldhA gene, the frdA gene and the adhE gene. In some embodiments, the genetically engineered bacteria comprise one or more gene sequence(s) encoding one or more GLP-2 polypeptides for secretion and further comprise a mutation in the endogenous pta and adhE genes. In some embodiments, the genetically engineered bacteria comprise one or more gene sequence(s) encoding one or more GLP-2 polypeptides for secretion and further comprise a mutation in the endogenous pta and ldhA genes. In some embodiments, the genetically engineered bacteria comprise one or more gene sequence(s) encoding one or more GLP-2 polypeptides for secretion and further comprise a mutation in the endogenous pta and frdA genes. In some embodiments, the genetically engineered bacteria comprise one or more gene sequence(s) encoding one or more GLP-2 polypeptides for secretion and further comprise a mutation and/or deletion in the endogenous pta, ldhA and frdA genes. In some embodiments, the genetically engineered bacteria comprise one or more gene sequence(s) encoding one or more GLP-2 polypeptides for secretion and further comprise a mutation in the endogenous pta, ldhA, and adhE genes. In some embodiments, the genetically engineered bacteria comprise one or more gene sequence(s) encoding one or more GLP-2 polypeptides for secretion and further comprise a mutation in the endogenous pta, frdA and adhE genes. In some embodiments, the genetically engineered bacteria comprise one or more gene sequence(s) encoding one or GLP-2 polypeptides for secretion and further comprise a mutation and/or deletion in the endogenous pta, ldhA, frdA, and adhE genes.

[0693] In some embodiments, the genetically engineered bacteria comprise one or more gene sequence(s) selected from PhoA-GLP-2, OmpF-GLP-2, and TorA-GLP-2 and further comprise a mutation and/or deletion in the endogenous pta gene. In some embodiments, the genetically engineered bacteria comprise one or more gene sequence(s) selected from PhoA-GLP-2, OmpF-GLP-2, and TorA-GLP-2 and further comprise a mutation and/or deletion in the endogenous pta gene and in one or more endogenous genes selected from in the ldhA gene, the frdA gene and the adhE gene. In some embodiments, the genetically engineered bacteria comprise one or more gene sequence(s) selected from PhoA-GLP-2, OmpF-GLP-2, and TorA-GLP-2 and further comprise a mutation in the endogenous pta and adhE genes. In some embodiments, the genetically engineered bacteria comprise one or more gene sequence(s) selected from PhoA-GLP-2, OmpF-GLP-2, and TorA-GLP-2 and further comprise a mutation in the endogenous pta and ldhA genes.

[0694] In some embodiments, the genetically engineered bacteria comprise one or more gene sequence(s) selected from PhoA-GLP-2, OmpF-GLP-2, and TorA-GLP-2 and further comprise a mutation in the endogenous pta and frdA genes. In some embodiments, the genetically engineered bacteria comprise one or more gene sequence(s) selected from PhoA-GLP-2, OmpF-GLP-2, and TorA-GLP-2 and further comprise a mutation and/or deletion in the endogenous pta, ldhA and frdA genes. In some embodiments, the genetically engineered bacteria comprise one or more gene sequence(s) selected from PhoA-GLP-2, OmpF-GLP-2, and TorA-GLP-2 and further comprise a mutation in the endogenous pta, ldhA, and adhE genes. In some embodiments, the genetically engineered bacteria comprise one or more gene sequence(s) selected from PhoA-GLP-2, OmpF-GLP-2, and TorA-GLP-2 and further comprise a mutation in the endogenous pta, frdA and adhE genes. In some embodiments, the genetically engineered bacteria comprise one or more gene sequence(s) selected from PhoA-GLP-2, OmpF-GLP-2, and TorA-GLP-2 and further comprise a mutation in the endogenous pta, ldhA, frdA, and adhE genes

[0695] In some embodiments, the genetically engineered bacteria produce 0% to to 2% to 4%, 4% to 6%, 6% to 8%, 8% to 10%, 10% to 12%, 12% to 14%, 14% to 16%, 16% to 18%, 18% to 20%, 20% to 25%, 25% to 30%, 30% to 35%, 35% to 40%, 40% to 45% 45% to 50%, 50% to 55%, 55% to 60%, 60% to 65%, 65% to 70% to 80%, 80% to 90%, or 90% to 100% less acetate than unmodified bacteria of the same bacterial subtype under the same conditions. In yet another embodiment, the genetically engineered bacteria produce 1.0-1.2-fold, 1.2-1.4-fold, 1.4-1.6-fold, 1.6-1.8-fold, 1.8-2-fold, or two-fold less acetate than unmodified bacteria of the same bacterial subtype under the same conditions. In yet another embodiment, the the genetically engineered bacteria produce three-fold, four-fold, five-fold, six-fold, seven-fold, eight-fold, nine-fold, ten-fold, fifteen-fold, twenty-fold, thirty-fold, forty-fold, or fifty-fold, less acetate than unmodified bacteria of the same bacterial subtype under the same conditions.

[0696] In some embodiments, the genetically engineered bacteria produce 0% to to 2% to 4%, 4% to 6%, 6% to 8%, 8% to 10%, 10% to 12%, 12% to 14%, 14% to 16%, 16% to 18%, 18% to 20%, 20% to 25%, 25% to 30%, 30% to 35%, 35% to 40%, 40% to 45% 45% to 50%, 50% to 55%, 55% to 60%, 60% to 65%, 65% to 70% to 80%, 80% to 90%, or 90% to 100% more GLP-2 than unmodified bacteria of the same bacterial subtype under the same conditions. In yet another embodiment, the genetically engineered bacteria produce 1.0-1.2-fold, 1.2-1.4-fold, 1.4-1.6-fold, 1.6-1.8-fold, 1.8-2-fold, or two-fold more GLP-2 than unmodified bacteria of the same bacterial subtype under the same conditions. In yet another embodiment, the the genetically engineered bacteria produce three-fold, four-fold, five-fold, six-fold, seven-fold, eight-fold, nine-fold, ten-fold, fifteen-fold, twenty-fold, thirty-fold, forty-fold, or fifty-fold, more GLP-2 than unmodified bacteria of the same bacterial subtype under the same conditions.

[0697] IL-19, IL-20, and/or IL-24

[0698] In some embodiments, the genetically engineered bacteria are capable of producing IL-19, IL-20, and/or IL-24. In some embodiments, the genetically engineered bacteria are capable of producing IL-19, IL-20, and/or IL-24 under inducing conditions, e.g., under a condition(s) associated with inflammation. In some embodiments, the genetically engineered bacteria are capable of producing IL-19, IL-20 and/or IL-24 in low-oxygen conditions.

[0699] To improve acetate production, while maintaining high levels of IL-19, IL-20, AND/OR IL-24 secretion, targeted one or more deletions can be introduced in competing metabolic arms of mixed acid fermentation to prevent the production of alternative metabolic fermentative byproducts (thereby increasing acetate production).

[0700] Non-limiting examples of competing such competing metabolic arms are frdA (converts phosphoenolpyruvate to succinate), ldhA (converts pyruvate to lactate) and adhE (converts Acetyl-CoA to Ethanol). Deletions which may be introduced therefore include deletion of adhE, ldh, and frd. Thus, in certain embodiments, the genetically engineered bacteria comprise one or more gene sequence(s) encoding one or more IL-19, IL-20, AND/OR IL-24 polypeptides for secretion and further comprise mutations and/or deletions in one or more of frdA, ldhA, and adhE.

[0701] In some embodiments, the genetically engineered bacteria comprise one or more gene sequence(s) encoding one or more IL-19, IL-20, AND/OR IL-24-polypeptides for secretion described herein and one or more mutation(s) and/or deletion(s) in one or more genes selected from the ldhA gene, the frdA gene and the adhE gene.

[0702] In some embodiments, the genetically engineered bacteria comprise one or more gene sequence(s) encoding one or more IL-19, IL-20, AND/OR IL-24 polypeptides for secretion and further comprise a mutation and/or deletion in one or more endogenous genes selected from in the ldhA gene, the frdA gene and the adhE genes. In some embodiments, the genetically engineered bacteria comprise one or more gene sequence(s) encoding one or more IL-19, IL-20, AND/OR IL-24 polypeptides for secretion and further comprise a mutation and/or deletion in the endogenous ldhA gene. In some embodiments, the genetically engineered bacteria comprise one or more gene sequence(s) encoding one or more IL-19, IL-20, AND/OR IL-24 polypeptides for secretion and further comprise a mutation and/or deletion in the endogenous adhE gene. In some embodiments, the genetically engineered bacteria comprise one or more gene sequence(s) encoding one or more IL-19, IL-20, AND/OR IL-24 polypeptides for secretion and further comprise a mutation and/or deletion in the endogenous frdA gene. In some embodiments, the genetically engineered bacteria comprise one or more gene sequence(s) encoding one or more IL-19, IL-20, AND/OR IL-24 polypeptides for secretion and further comprise a mutation and/or deletion in the endogenous ldhA and rdA genes. In some embodiments, the genetically engineered bacteria comprise one or more gene sequence(s) encoding one or more IL-19, IL-20, AND/OR IL-24 polypeptides for secretion and further comprise a mutation and/or deletion in the endogenous ldhA genes and adhE genes. In some embodiments, the genetically engineered bacteria comprise one or more gene sequence(s) encoding one or more IL-19, IL-20, AND/OR IL-24 polypeptides for secretion and further comprise a mutation and/or deletion in the endogenous frdA and adhE genes. In some embodiments, the genetically engineered bacteria comprise one or more gene sequence(s) encoding one or more IL-19, IL-20, AND/OR IL-24 polypeptides for secretion and further comprise a mutation and/or deletion in the endogenous ldhA, the frdA, and adhE genes. In some embodiments, the genetically engineered bacteria comprise one or more gene sequence(s) encoding one or more IL-19, IL-20, AND/OR IL-24 polypeptides for secretion and further comprise a mutation and/or deletion in one or more endogenous genes selected from in the ldhA gene, the frdA gene and the adhE genes.

[0703] In some embodiments, the genetically engineered bacteria comprise one or more gene sequence(s) selected from PhoA-IL-19, IL-20, AND/OR IL-24, OmpF-IL-19, IL-20, AND/OR IL-24, and TorA-IL-19, IL-20, AND/OR IL-24 and further comprise a mutation and/or deletion in the endogenous ldhA gene. In some embodiments, the genetically engineered bacteria comprise one or more gene sequence(s) selected from PhoA-IL-19, IL-20, AND/OR IL-24, OmpF-IL-19, IL-20, AND/OR IL-24, and TorA-IL-19, IL-20, AND/OR IL-24 and further comprise a mutation and/or deletion in the endogenous adhE gene. In some embodiments, the genetically engineered bacteria comprise one or more gene sequence(s) selected from PhoA-IL-19, IL-20, AND/OR IL-24, OmpF-IL-19, IL-20, AND/OR IL-24, and TorA-IL-19, IL-20, AND/OR IL-24 and further comprise a mutation and/or deletion in the endogenous frdA gene. In some embodiments, the genetically engineered bacteria comprise one or more gene sequence(s) selected from PhoA-IL-19, IL-20, AND/OR IL-24, OmpF-IL-19, IL-20, AND/OR IL-24, and TorA-IL-19, IL-20, AND/OR IL-24 and further comprise a mutation and/or deletion in the endogenous ldhA and frdA genes. In some embodiments, the genetically engineered bacteria comprise one or more gene sequence(s) selected from PhoA-IL-19, IL-20, AND/OR IL-24, OmpF-IL-19, IL-20, AND/OR IL-24, and TorA-IL-19, IL-20, AND/OR IL-24 and further comprise a mutation and/or deletion in the endogenous ldhA genes and adhE genes. In some embodiments, the genetically engineered bacteria comprise one or more gene sequence(s) selected from PhoA-IL-19, IL-20, AND/OR IL-24, OmpF-IL-19, IL-20, AND/OR IL-24, and TorA-IL-19, IL-20, AND/OR IL-24 and further comprise a mutation and/or deletion in the endogenous frdA and adhE genes. In some embodiments, the genetically engineered bacteria comprise one or more gene sequence(s) selected from PhoA-IL-19, IL-20, AND/OR IL-24, OmpF-IL-19, IL-20, AND/OR IL-24, and TorA-IL-19, IL-20, AND/OR IL-24 and further comprise a mutation and/or deletion in the endogenous ldhA, the frdA, and adhE genes. In some embodiments, the genetically engineered bacteria produce 0% to to 2% to 4%, 4% to 6%, 6% to 8%, 8% to 10%, 10% to 12%, 12% to 14%, 14% to 16%, 16% to 18%, 18% to 20%, 20% to 25%, 25% to 30%, 30% to 35%, 35% to 40%, 40% to 45% 45% to 50%, 50% to 55%, 55% to 60%, 60% to 65%, 65% to 70% to 80%, 80% to 90%, or 90% to 100% more acetate than unmodified bacteria of the same bacterial subtype under the same conditions. In yet another embodiment, the genetically engineered bacteria produce 1.0-1.2-fold, 1.2-1.4-fold, 1.4-1.6-fold, 1.6-1.8-fold, 1.8-2-fold, or two-fold more acetate than unmodified bacteria of the same bacterial subtype under the same conditions. In yet another embodiment, the genetically engineered bacteria produce three-fold, four-fold, five-fold, six-fold, seven-fold, eight-fold, nine-fold, ten-fold, fifteen-fold, twenty-fold, thirty-fold, forty-fold, or fifty-fold, more acetate than unmodified bacteria of the same bacterial subtype under the same conditions.

[0704] In some embodiments, the genetically engineered bacteria produce 0% to 2% to 4%, 4% to 6%, 6% to 8%, 8% to 10%, 10% to 12%, 12% to 14%, 14% to 16%, 16% to 18%, 18% to 20%, 20% to 25%, 25% to 30%, 30% to 35%, 35% to 40%, 40% to 45% 45% to 50%, 50% to 55%, 55% to 60%, 60% to 65%, 65% to 70% to 80%, 80% to 90%, or 90% to 100% more IL-19, IL-20, AND/OR IL-24 than unmodified bacteria of the same bacterial subtype under the same conditions. In yet another embodiment, the genetically engineered bacteria produce 1.0-1.2-fold, 1.2-1.4-fold, 1.4-1.6-fold, 1.6-1.8-fold, 1.8-2-fold, or two-fold more IL-19, IL-20, AND/OR IL-24 than unmodified bacteria of the same bacterial subtype under the same conditions. In yet another embodiment, the genetically engineered bacteria produce three-fold, four-fold, five-fold, six-fold, seven-fold, eight-fold, nine-fold, ten-fold, fifteen-fold, twenty-fold, thirty-fold, forty-fold, or fifty-fold, more IL-19, IL-20, AND/OR IL-24 than unmodified bacteria of the same bacterial subtype under the same conditions.

[0705] In certain situations, the need may arise to prevent and/or reduce acetate production by of an engineered or naturally occurring strain, e.g., E. coli Nissle, while maintaining high levels of IL-19, IL-20, AND/OR IL-24 secretion. Without wishing to be bound by theory, one or more mutations and/or deletions in one or more gene(s) encoding in one or more enzymes which function in the acetate producing metabolic arm of fermentation should reduce and/or prevent production of acetate. A non-limiting example of such an enzyme is phosphate acetyltransferase (Pta), which is the first enzyme in the metabolic arm converting acetyl-CoA to acetate. Deletion and/or mutation of the Pta gene or a gene encoding another enzyme in this metabolic arm may also allow for more acetyl-CoA to be used for IL-19, IL-20, AND/OR IL-24 secretion. Additionally, one or more mutations preventing or reducing the flow through other metabolic arms of mixed acid fermentation, such as those which produce succinate, lactate, and/or ethanol can increase the production of acetyl-CoA, which is available for IL-19, IL-20, AND/OR IL-24 synthesis. Such mutations and/or deletions, include but are not limited to mutations and/or deletions in the frdA, ldhA, and/or adhE genes.

[0706] In some embodiments, the genetically engineered bacteria comprise one or more gene sequence(s) encoding one or more IL-19, IL-20, AND/OR IL-24 polypeptides for secretion and further comprise a mutation and/or deletion in the endogenous pta gene. In some embodiments, the genetically engineered bacteria comprise one or more gene sequence(s) encoding one or more IL-19, IL-20, AND/OR IL-24 polypeptides for secretion and further comprise a mutation and/or deletion in the endogenous pta gene and in one or more endogenous genes selected from in the ldhA gene, the frdA gene and the adhE gene. In some embodiments, the genetically engineered bacteria comprise one or more gene sequence(s) encoding one or more IL-19, IL-20, AND/OR IL-24 polypeptides for secretion and further comprise a mutation in the endogenous pta and adhE genes. In some embodiments, the genetically engineered bacteria comprise one or more gene sequence(s) encoding one or more IL-19, IL-20, AND/OR IL-24 polypeptides for secretion and further comprise a mutation in the endogenous pta and ldhA genes. In some embodiments, the genetically engineered bacteria comprise one or more gene sequence(s) encoding one or more IL-19, IL-20, AND/OR IL-24 polypeptides for secretion and further comprise a mutation in the endogenous pta and frdA genes. In some embodiments, the genetically engineered bacteria comprise one or more gene sequence(s) encoding one or more IL-19, IL-20, AND/OR IL-24 polypeptides for secretion and further comprise a mutation and/or deletion in the endogenous pta, ldhA and frdA genes. In some embodiments, the genetically engineered bacteria comprise one or more gene sequence(s) encoding one or more IL-19, IL-20, AND/OR IL-24 polypeptides for secretion and further comprise a mutation in the endogenous pta, ldhA, and adhE genes. In some embodiments, the genetically engineered bacteria comprise one or more gene sequence(s) encoding one or more IL-19, IL-20, AND/OR IL-24 polypeptides for secretion and further comprise a mutation in the endogenous pta, frdA and adhE genes. In some embodiments, the genetically engineered bacteria comprise one or more gene sequence(s) encoding one or IL-19, IL-20, AND/OR IL-24 polypeptides for secretion and further comprise a mutation and/or deletion in the endogenous pta, ldhA, frdA, and adhE genes.

[0707] In some embodiments, the genetically engineered bacteria comprise one or more gene sequence(s) selected from PhoA-IL-19, IL-20, AND/OR IL-24, OmpF-IL-19, IL-20, AND/OR IL-24, and TorA-IL-19, IL-20, AND/OR IL-24 and further comprise a mutation and/or deletion in the endogenous pta gene. In some embodiments, the genetically engineered bacteria comprise one or more gene sequence(s) selected from PhoA-IL-19, IL-20, AND/OR IL-24, OmpF-IL-19, IL-20, AND/OR IL-24, and TorA-IL-19, IL-20, AND/OR IL-24 and further comprise a mutation and/or deletion in the endogenous pta gene and in one or more endogenous genes selected from in the ldhA gene, the frdA gene and the adhE gene. In some embodiments, the genetically engineered bacteria comprise one or more gene sequence(s) selected from PhoA-IL-19, IL-20, AND/OR IL-24, OmpF-IL-19, IL-20, AND/OR IL-24, and TorA-IL-19, IL-20, AND/OR IL-24 and further comprise a mutation in the endogenous pta and adhE genes. In some embodiments, the genetically engineered bacteria comprise one or more gene sequence(s) selected from PhoA-IL-19, IL-20, AND/OR IL-24, OmpF-IL-19, IL-20, AND/OR IL-24, and TorA-IL-19, IL-20, AND/OR IL-24 and further comprise a mutation in the endogenous pta and ldhA genes.

[0708] In some embodiments, the genetically engineered bacteria comprise one or more gene sequence(s) selected from PhoA-IL-19, IL-20, AND/OR IL-24, OmpF-IL-19, IL-20, AND/OR IL-24, and TorA-IL-19, IL-20, AND/OR IL-24 and further comprise a mutation in the endogenous pta and frdA genes. In some embodiments, the genetically engineered bacteria comprise one or more gene sequence(s) selected from PhoA-IL-19, IL-20, AND/OR IL-24, OmpF-IL-19, IL-20, AND/OR IL-24, and TorA-IL-19, IL-20, AND/OR IL-24 and further comprise a mutation and/or deletion in the endogenous pta, ldhA and frdA genes. In some embodiments, the genetically engineered bacteria comprise one or more gene sequence(s) selected from PhoA-IL-19, IL-20, AND/OR IL-24, OmpF-1-19, IL-20, AND/OR IL-24, and TorA-IL-19, IL-20, AND/OR IL-24 and further comprise a mutation in the endogenous pta, ldhA, and adhE genes. In some embodiments, the genetically engineered bacteria comprise one or more gene sequence(s) selected from PhoA-IL-19, IL-20, AND/OR IL-24, OmpF-IL-19, IL-20, AND/OR IL-24, and TorA-IL-19, IL-20, AND/OR IL-24 and further comprise a mutation in the endogenous pta, frdA and adhE genes. In some embodiments, the genetically engineered bacteria comprise one or more gene sequence(s) selected from PhoA-IL-19, IL-20, AND/OR IL-24, OmpF-IL-19, IL-20, AND/OR IL-24, and TorA-IL-19, IL-20, AND/OR IL-24 and further comprise a mutation in the endogenous pta, ldhA, frdA, and adhE genes

[0709] In some embodiments, the genetically engineered bacteria produce 0% to to 2% to 4%, 4% to 6%, 6% to 8%, 8% to 10%, 10% to 12%, 12% to 14%, 14% to 16%, 16% to 18%, 18% to 20%, 20% to 25%, 25% to 30%, 30% to 35%, 35% to 40%, 40% to 45% 45% to 50%, 50% to 55%, 55% to 60%, 60% to 65%, 65% to 70% to 80%, 80% to 90%, or 90% to 100% less acetate than unmodified bacteria of the same bacterial subtype under the same conditions. In yet another embodiment, the genetically engineered bacteria produce 1.0-1.2-fold, 1.2-1.4-fold, 1.4-1.6-fold, 1.6-1.8-fold, 1.8-2-fold, or two-fold less acetate than unmodified bacteria of the same bacterial subtype under the same conditions. In yet another embodiment, the the genetically engineered bacteria produce three-fold, four-fold, five-fold, six-fold, seven-fold, eight-fold, nine-fold, ten-fold, fifteen-fold, twenty-fold, thirty-fold, forty-fold, or fifty-fold, less acetate than unmodified bacteria of the same bacterial subtype under the same conditions.

[0710] In some embodiments, the genetically engineered bacteria produce 0% to to 2% to 4%, 4% to 6%, 6% to 8%, 8% to 10%, 10% to 12%, 12% to 14%, 14% to 16%, 16% to 18%, 18% to 20%, 20% to 25%, 25% to 30%, 30% to 35%, 35% to 40%, 40% to 45% 45% to 50%, 50% to 55%, 55% to 60%, 60% to 65%, 65% to 70% to 80%, 80% to 90%, or 90% to 100% more IL-19, IL-20, AND/OR IL-24 than unmodified bacteria of the same bacterial subtype under the same conditions. In yet another embodiment, the genetically engineered bacteria produce 1.0-1.2-fold, 1.2-1.4-fold, 1.4-1.6-fold, 1.6-1.8-fold, 1.8-2-fold, or two-fold more IL-19, IL-20, AND/OR IL-24 than unmodified bacteria of the same bacterial subtype under the same conditions. In yet another embodiment, the the genetically engineered bacteria produce three-fold, four-fold, five-fold, six-fold, seven-fold, eight-fold, nine-fold, ten-fold, fifteen-fold, twenty-fold, thirty-fold, forty-fold, or fifty-fold, more IL-19, IL-20, AND/OR IL-24 than unmodified bacteria of the same bacterial subtype under the same conditions.

[0711] Inhibition of Pro-Inflammatory Molecules

[0712] In some embodiments, the genetically engineered bacteria of the invention are capable of producing a molecule that is capable of inhibiting a pro-inflammatory molecule. The genetically engineered bacteria may express any suitable inhibitory molecule, e.g., a single-chain variable fragment (scFv), antisense RNA, siRNA, or shRNA, that is capable of neutralizing one or more pro-inflammatory molecules, e.g., TNF, IFN-γ, IL-1β, IL-6, IL-8, IL-17, IL-18, IL-21, IL-23, IL-26, IL-32, Arachidonic acid, prostaglandins (e.g., PGE₂), PGI₂, serotonin, thromboxanes (e.g., TXA₂), leukotrienes (e.g., LTB₄), hepoxillin A₃, or chemokines (Keates et al., 2008; Ahmad et al., 2012). The genetically engineered bacteria may inhibit one or more pro-inflammatory molecules, e.g., TNF, IL-17. In some embodiments, the genetically engineered bacteria are capable of modulating one or more molecule(s) shown in Table 20. In some embodiments, the genetically engineered bacteria are capable of inhibiting, removing, degrading, and/or metabolizing one or more inflammatory molecules.

TABLE 20

| Metabolites | Related bacteria | Potential biological functions |
|---|---|---|
| Bile acids: cholate, hyocholate, | Lactobacillus, | Absorb dietary fats and lipid-soluble |
| deoxycholate, chenodeoxycholate, | Bifidobacteria, | vitamins, facilitate lipid absorption, |
| a-muricholate, b-muricholate, w- | Enterobacter, | maintain intestinal barrier function, |
| muricholate, taurocholate, | Bacteroides, | signal systemic endocrine functions to |
| glycocholate, taurochenoxycholate, | Clostridium | regulate triglycerides, cholesterol, |
| glycochenodeoxycholate, | | glucose and energy homeostasis. |
| taurocholate, tauro-a-muricholate, | | |
| tauro-b-muricholate, lithocholate, | | |
| ursodeoxycholate, | | |
| hyodeoxycholate, | | |
| glycodeoxylcholate | | |
| Choline metabolites: methylamine, | Faecalibacterium | Modulate lipid metabolism and glucose |
| dimethylamine, trimethylamine, | prausnitzii, | homeostasis. Involved in nonalcoholic |
| trimethylamine-N-oxide, | Bifidobacterium | fatty liver disease, dietary induced |
| dimethylglycine, betaine | | obesity, diabetes, and cardiovascular |
| | | disease. |
| Phenolic, benzoyl, and phenyl | Clostridium difficile, | Detoxification of xenobiotics; indicate gut |
| derivatives: benzoic acid, hippuric | F. prausnitzii, | microbial composition and activity; utilize |
| acid, 2-hydroxyhippuric acid, 2- | Bifidobacterium, | polyphenols. Urinary hippuric acid may |
| hydroxybenzoic acid, 3- | Subdoligranulum, | be a biomarker of hypertension and |
| hydroxyhippuric acid, 3- | Lactobacillus | obesity in humans. Urinary 4- |
| hydroxybenzoic acid, 4 | | hydroxyphenylacetate, 4-cresol, and |
| hydroxybenzoic acid, | | phenylacetate are elevated in colorectal |
| 3hydroxyphenylpropionate, 4- | | cancer. Urinary 4-cresyl sulfate is |
| hydroxyphenylpropionate, 3- | | elevated in children with severe autism. |
| hydroxycinnamate, 4- | | |
| methylphenol, tyrosine, | | |
| phenylalanine, 4-cresol, 4-cresyl | | |
| sulfate, 4-cresyl glucuronide, 4- | | |
| hydroxyphenylacetate | | |
| Indole derivatives: N- | Clostridium | Protect against stress-induced lesions in |
| acetyltryptophan, indoleacetate, | sporogenes, | the GI tract; modulate expression of |
| indoleacetylglycine (IAG), indole, | E. coli | proinflammatory genes, increase |
| indoxyl sulfate, indole-3- | | expression of anti-inflammatory genes, |
| propionate, melatonin, melatonin | | strengthen epithelial cell barrier |
| 6-sulfate, serotonin, 5- | | properties. Implicated in GI pathologies, |
| hydroxyindole | | brain-gut axis, and a few neurological |
| | | conditions. |
| Vitamins: vitamin K, vitamin B12, | Bifidobacterium | Provide complementary endogenous |
| biotin, folate, | | sources of vitamins, strengthen immune |
| thiamine, riboflavin, pyridoxine | | function, exert epigenetic effects to |
| | | regulate cell proliferation. |
| Polyamines: putrescine, | Campylobacter | Exert genotoxic effects on the host, anti- |
| cadaverine, | jejuni, | inflammatory and antitumoral effects. |
| spermidine, spermine | Clostridium | Potential tumor markers. |
| | saccharolyticum | |
| Lipids: conjugated fatty acids, LPS, | Bifidobacterium, | Impact intestinal permeability, activate |
| peptidoglycan, acylglycerols, | Roseburia, | intestinebrain- liver neural axis to |
| sphingomyelin, cholesterol, | Lactobacillus, | regulate glucose homeostasis; LPS |
| phosphatidylcholines, | Klebsiella, | induces chronic systemic inflammation; |
| phosphoethanolamines, | Enterobacter, | conjugated fatty acids improve |
| triglycerides | Citrobacter, | hyperinsulinemia, enhance the immune |
| | Clostridium | system and alter lipoprotein profiles. |
| Others: D-lactate, formate, | Bacteroides, | Direct or indirect synthesis or utilization |
| methanol, ethanol, succinate, | Pseudobutyrivibrio, | of |
| lysine, glucose, urea, a- | Ruminococcus, | compounds or modulation of linked |
| ketoisovalerate, creatine, | Faecalibacterium | pathways including endocannabinoid |
| creatinine, endocannabinoids, 2- | | system. |
| arachidonoylglycerol | | |
| (2-AG), N- | | |
| arachidonoylethanolamide, LPS | | |

[0713] In some embodiments, the genetically engineered bacteria are capable of producing an anti-inflammation and/or gut barrier enhancer molecule and further producing a molecule that is capable of inhibiting an inflammatory molecule. In some embodiments, the genetically engineered bacteria of the invention are capable of producing an anti-inflammation and/or gut barrier enhancer molecule and further producing an enzyme that is capable of degrading an inflammatory molecule. For example, the genetically engineered bacteria of the invention are capable of expressing a gene cassette for producing butyrate, as well as a molecule or biosynthetic pathway for inhibiting, removing, degrading, and/or metabolizing an inflammatory molecule, e.g., PGE₂.

[0714] RNAi, scFV, Other Mechanisms

[0715] RNA interference (RNAi) is a post-transcriptional gene silencing mechanism in plants and animals. RNAi is activated when microRNA (miRNA), double-stranded RNA (dsRNA), or short hairpin RNA (shRNA) is processed into short interfering RNA (siRNA) duplexes (Keates et al., 2008). RNAi can be “activated in vitro and in vivo by non-pathogenic bacteria engineered to manufacture and deliver shRNA to target cells” such as mammalian cells (Keates et al., 2008). In some embodiments, the genetically engineered bacteria of the invention induce RNAi-mediated gene silencing of one or more pro-inflammatory molecules in low-oxygen conditions. In some embodiments, the genetically engineered bacteria produce siRNA targeting TNF in low-oxygen conditions.

[0716] Single-chain variable fragments (scFv) are “widely used antibody fragments . . . produced in prokaryotes” (Frenzel et al., 2013). scFv lacks the constant domain of a traditional antibody and expresses the antigen-binding domain as a single peptide. Bacteria such as Escherichia coli are capable of producing scFv that target pro-inflammatory cytokines, e.g., TNF (Hristodorov et al., 2014). In some embodiments, the genetically engineered bacteria of the invention express a binding protein for neutralizing one or more pro-inflammatory molecules in low-oxygen conditions. In some embodiments, the genetically engineered bacteria produce scFv targeting TNF in low-oxygen conditions. In some embodiments, the genetically engineered bacteria produce both scFv and siRNA targeting one or more pro-inflammatory molecules in low-oxygen conditions (see, e.g., Xiao et al., 2014).

[0717] One of skill in the art would appreciate that additional genes and gene cassettes capable of producing anti-inflammation and/or gut barrier function enhancer molecules are known in the art and may be expressed by the genetically engineered bacteria of the invention. In some embodiments, the gene or gene cassette for producing a therapeutic molecule also comprises additional transcription and translation elements, e.g., a ribosome binding site, to enhance expression of the therapeutic molecule.

[0718] In some embodiments, the genetically engineered bacteria produce two or more anti-inflammation and/or gut barrier function enhancer molecules. In certain embodiments, the two or more molecules behave synergistically to reduce gut inflammation and/or enhance gut barrier function. In some embodiments, the genetically engineered bacteria express at least one anti-inflammation molecule and at least one gut barrier function enhancer molecule. In certain embodiments, the genetically engineered bacteria express IL-10 and GLP-2. In alternate embodiments, the genetically engineered bacteria express IL-10 and butyrate.

[0719] In some embodiments, the genetically engineered bacteria are capable of producing IL-2, IL-10, IL-22, IL-27, propionate, and butyrate. In some embodiments, the genetically engineered bacteria are capable of producing IL-10, IL-27, GLP-2, and butyrate. In some embodiments, the genetically engineered bacteria are capable of producing GLP-2, IL-10, IL-22, SOD, butyrate, and propionate. In some embodiments, the genetically engineered bacteria are capable of GLP-2, IL-2, IL-10, IL-22, IL-27, SOD, butyrate, and propionate. Any suitable combination of therapeutic molecules may be produced by the genetically engineered bacteria.

[0720] Generation of Bacterial Strains with Enhance Ability to Transport Amino Acids

[0721] Due to their ease of culture, short generation times, very high population densities and small genomes, microbes can be evolved to unique phenotypes in abbreviated timescales. Adaptive laboratory evolution (ALE) is the process of passaging microbes under selective pressure to evolve a strain with a preferred phenotype. Most commonly, this is applied to increase utilization of carbon/energy sources or adapting a strain to environmental stresses (e.g., temperature, pH), whereby mutant strains more capable of growth on the carbon substrate or under stress will outcompete the less adapted strains in the population and will eventually come to dominate the population.

[0722] This same process can be extended to any essential metabolite by creating an auxotroph. An auxotroph is a strain incapable of synthesizing an essential metabolite and must therefore have the metabolite provided in the media to grow. In this scenario, by making an auxotroph and passaging it on decreasing amounts of the metabolite, the resulting dominant strains should be more capable of obtaining and incorporating this essential metabolite.

[0723] For example, if the biosynthetic pathway for producing an amino acid is disrupted a strain capable of high-affinity capture of said amino acid can be evolved via ALE. First, the strain is grown in varying concentrations of the auxotrophic amino acid, until a minimum concentration to support growth is established. The strain is then passaged at that concentration, and diluted into lowering concentrations of the amino acid at regular intervals. Over time, cells that are most competitive for the amino acid—at growth-limiting concentrations—will come to dominate the population. These strains will likely have mutations in their amino acid-transporters resulting in increased ability to import the essential and limiting amino acid.

[0724] Similarly, by using an auxotroph that cannot use an upstream metabolite to form an amino acid, a strain can be evolved that not only can more efficiently import the upstream metabolite, but also convert the metabolite into the essential downstream metabolite. These strains will also evolve mutations to increase import of the upstream metabolite, but may also contain mutations which increase expression or reaction kinetics of downstream enzymes, or that reduce competitive substrate utilization pathways.

[0725] A metabolite innate to the microbe can be made essential via mutational auxotrophy and selection applied with growth-limiting supplementation of the endogenous metabolite. However, phenotypes capable of consuming non-native compounds can be evolved by tying their consumption to the production of an essential compound. For example, if a gene from a different organism is isolated which can produce an essential compound or a precursor to an essential compound this gene can be recombinantly introduced and expressed in the heterologous host. This new host strain will now have the ability to synthesize an essential nutrient from a previously non-metabolizable substrate.

[0726] Hereby, a similar ALE process can be applied by creating an auxotroph incapable of converting an immediately downstream metabolite and selecting in growth-limiting amounts of the non-native compound with concurrent expression of the recombinant enzyme. This will result in mutations in the transport of the non-native substrate, expression and activity of the heterologous enzyme and expression and activity of downstream native enzymes. It should be emphasized that the key requirement in this process is the ability to tether the consumption of the non-native metabolite to the production of a metabolite essential to growth.

[0727] Once the basis of the selection mechanism is established and minimum levels of supplementation have been established, the actual ALE experimentation can proceed. Throughout this process several parameters must be vigilantly monitored. It is important that the cultures are maintained in an exponential growth phase and not allowed to reach saturation/stationary phase. This means that growth rates must be check during each passaging and subsequent dilutions adjusted accordingly. If growth rate improves to such a degree that dilutions become large, then the concentration of auxotrophic supplementation should be decreased such that growth rate is slowed, selection pressure is increased and dilutions are not so severe as to heavily bias subpopulations during passaging. In addition, at regular intervals cells should be diluted, grown on solid media and individual clones tested to confirm growth rate phenotypes observed in the ALE cultures.

[0728] Predicting when to halt the stop the ALE experiment also requires vigilance. As the success of directing evolution is tied directly to the number of mutations “screened” throughout the experiment and mutations are generally a function of errors during DNA replication, the cumulative cell divisions (CCD) acts as a proxy for total mutants which have been screened. Previous studies have shown that beneficial phenotypes for growth on different carbon sources can be isolated in about 1011.2 CCD1. This rate can be accelerated by the addition of chemical mutagens to the cultures—such as N-methyl-N-nitro-N-nitrosoguanidine (NTG)—which causes increased DNA replication errors. However, when continued passaging leads to marginal or no improvement in growth rate the population has converged to some fitness maximum and the ALE experiment can be halted.

[0729] At the conclusion of the ALE experiment, the cells should be diluted, isolated on solid media and assayed for growth phenotypes matching that of the culture flask. Best performers from those selected are then prepped for genomic DNA and sent for whole genome sequencing. Sequencing with reveal mutations occurring around the genome capable of providing improved phenotypes, but will also contain silent mutations (those which provide no benefit but do not detract from desired phenotype). In cultures evolved in the presence of NTG or other chemical mutagen, there will be significantly more silent, background mutations. If satisfied with the best performing strain in its current state, the user can proceed to application with that strain. Otherwise the contributing mutations can be deconvoluted from the evolved strain by reintroducing the mutations to the parent strain by genome engineering techniques. See Lee, D.-H., Feist, A. M., Barrett, C. L. & Palsson, B. Ø. Cumulative Number of Cell Divisions as a Meaningful Timescale for Adaptive Laboratory Evolution of Escherichia coli. PLoS ONE 6, e26172 (2011).

[0730] Similar methods can be used to generate E. coli Nissle mutants that consume or import tryptophan.

[0731] Inducible Regulatory Regions

[0732] In some embodiments, the bacterial cell comprises a stably maintained plasmid or chromosome carrying the gene(s) encoding payload (s), such that the payload(s) can be expressed in the host cell, and the host cell is capable of survival and/or growth in vitro, e.g., in medium, and/or in vivo, e.g., in the gut. In some embodiments, bacterial cell comprises two or more distinct payloads or operons, e.g., two or more payload genes. In some embodiments, bacterial cell comprises three or more distinct transporters or operons, e.g., three or more payload genes. In some embodiments, bacterial cell comprises 4, 5, 6, 7, 8, 9, 10, or more distinct payloads or operons, e.g., 4, 5, 6, 7, 8, 9, 10, or more payload genes.

[0733] Herein the terms “payload” “polypeptide of interest” or “polypeptides of interest”, “protein of interest”, “proteins of interest”, “payloads” “effector molecule”, “effector” refers to one or more effector molecules described herein and/or one or more enzyme(s) or polypeptide(s) function as enzymes for the production of such effector molecules. Non-limiting examples of payloads include anti-inflammation and/or gut barrier function enhancer molecule(s), including but not limited to, butyrate, propionate, acetate, IL10, IL-2, IL-22, IL-27, IL-20, IL-24, IL-19, SOD, GLP2, and/or tryptophan and/or its metabolites. As used herein, the term “polypeptide of interest” or “polypeptides of interest”, “protein of interest”, “proteins of interest”, “payload”, “payloads” further includes any or a plurality of any of the anti-inflammation and/or gut barrier function enhancer molecule(s). As used herein, the term “gene of interest” or “gene sequence of interest” includes any or a plurality of any of the gene(s) an/or gene sequence(s) and or gene cassette(s) encoding one or more anti-inflammation and/or gut barrier function enhancer molecule(s) described herein.

[0734] In some embodiments, the genetically engineered bacteria comprise multiple copies of the same payload gene(s). In some embodiments, the gene encoding the payload is present on a plasmid and operably linked to a directly or indirectly inducible promoter. In some embodiments, the gene encoding the payload is present on a plasmid and operably linked to a constitutive promoter. In some embodiments, the gene encoding the payload is present on a plasmid and operably linked to a promoter that is induced under low-oxygen or anaerobic conditions. In some embodiments, the gene encoding the payload is present on plasmid and operably linked to a promoter that is induced by exposure to tetracycline or arabinose, or another chemical or nutritional inducer described herein.

[0735] In some embodiments, the gene encoding the payload is present on a chromosome and operably linked to a directly or indirectly inducible promoter. In some embodiments, the gene encoding the payload is present on a chromosome and operably linked to a constitutive promoter. In some embodiments, the gene encoding the payload is present in the chromosome and operably linked to a promoter that is induced under low-oxygen or anaerobic conditions. In some embodiments, the gene encoding the payload is present on chromosome and operably linked to a promoter that is induced by exposure to tetracycline or arabinose, or another chemical or nutritional inducer described herein.

[0736] In some embodiments, the genetically engineered bacteria comprise two or more payloads, all of which are present on the chromosome. In some embodiments, the genetically engineered bacteria comprise two or more payloads, all of which are present on one or more same or different plasmids. In some embodiments, the genetically engineered bacteria comprise two or more payloads, some of which are present on the chromosome and some of which are present on one or more same or different plasmids.

[0737] In any of the nucleic acid embodiments described above, the one or more payload(s) for producing the anti-inflammation and/or gut barrier function enhancer molecule combinations are operably linked to one or more directly or indirectly inducible promoter(s). In some embodiments, the one or more payload(s) are operably linked to a directly or indirectly inducible promoter that is induced under exogeneous environmental conditions, e.g., conditions found in the gut. In some embodiments, the one or more payload(s) are operably linked to a directly or indirectly inducible promoter that is induced by metabolites found in the gut, or other specific conditions. In some embodiments, the one or more payload(s) are operably linked to a directly or indirectly inducible promoter that is induced under low-oxygen or anaerobic conditions. In some embodiments, the one or more payload(s) are operably linked to a directly or indirectly inducible promoter that is induced under inflammatory conditions (e.g., RNS, ROS), as described herein. In some embodiments, the one or more payload(s) are operably linked to a directly or indirectly inducible promoter that is induced under immunosuppressive conditions, e.g., as found in the tumor, as described herein. In some embodiments, the two or more gene sequence(s) are linked to a directly or indirectly inducible promoter that is induced by exposure a chemical or nutritional inducer, which may or may not be present under in vivo conditions and which may be present during in vitro conditions (such as strain culture, expansion, manufacture), such as tetracycline or arabinose, or others described herein. In some embodiments, the two or more payloads are all linked to a constitutive promoter. Such constitutive promoters are described in the tables herein.

[0738] In some embodiments, the promoter is induced under in vivo conditions, e.g., the gut, as described herein. In some embodiments, the promoters is induced under in vitro conditions, e.g., various cell culture and/or cell manufacturing conditions, as described herein. In some embodiments, the promoter is induced under in vivo conditions, e.g., the gut, as described herein, and under in vitro conditions, e.g., various cell culture and/or cell production and/or manufacturing conditions, as described herein.

[0739] In some embodiments, the promoter that is operably linked to the gene encoding the payload is directly induced by exogenous environmental conditions (e.g., in vivo and/or in vitro and/or production/manufacturing conditions). In some embodiments, the promoter that is operably linked to the gene encoding the payload is indirectly induced by exogenous environmental conditions (e.g., in vivo and/or in vitro and/or production/manufacturing conditions).

[0740] In some embodiments, the promoter is directly or indirectly induced by exogenous environmental conditions specific to the gut of a mammal. In some embodiments, the promoter is directly or indirectly induced by exogenous environmental conditions specific to the hypoxic environment of a tumor and/or the small intestine of a mammal. In some embodiments, the promoter is directly or indirectly induced by low-oxygen or anaerobic conditions such as the environment of the mammalian gut. In some embodiments, the promoter is directly or indirectly induced by molecules or metabolites that are specific to the tumor, a particular tissue or the gut of a mammal. In some embodiments, the promoter is directly or indirectly induced by a molecule that is co-administered with the bacterial cell.

[0741] FNR Dependent Regulation

[0742] The genetically engineered bacteria of the invention comprise a gene or gene cassette for producing an anti-inflammation and/or gut barrier function enhancer molecule(s), wherein the gene or gene cassette is operably linked to a directly or indirectly inducible promoter that is controlled by exogenous environmental condition(s). In some embodiments, the inducible promoter is an oxygen level-dependent promoter and the anti-inflammation and/or gut barrier function enhancer molecule(s) is expressed in low-oxygen, microaerobic, or anaerobic conditions. For example, in low oxygen conditions, the oxygen level-dependent promoter is activated by a corresponding oxygen level-sensing transcription factor, thereby driving production of the anti-inflammation and/or gut barrier function enhancer molecule(s).

[0743] Bacteria have evolved transcription factors that are capable of sensing oxygen levels. Different signaling pathways may be triggered by different oxygen levels and occur with different kinetics. An oxygen level-dependent promoter is a nucleic acid sequence to which one or more oxygen level-sensing transcription factors is capable of binding, wherein the binding and/or activation of the corresponding transcription factor activates downstream gene expression. In one embodiment, the genetically engineered bacteria comprise a gene or gene cassette for producing a payload under the control of an oxygen level-dependent promoter. In a more specific aspect, the genetically engineered bacteria comprise a gene or gene cassette for producing a payload under the control of an oxygen level-dependent promoter that is activated under low-oxygen or anaerobic environments, such as the environment of the mammalian gut.

[0744] In certain embodiments, the bacterial cell comprises a gene encoding a payload expressed under the control of a fumarate and nitrate reductase regulator (FNR) responsive promoter. In E. coli, FNR is a major transcriptional activator that controls the switch from aerobic to anaerobic metabolism (Unden et al., 1997). In the anaerobic state, FNR dimerizes into an active DNA binding protein that activates hundreds of genes responsible for adapting to anaerobic growth. In the aerobic state, FNR is prevented from dimerizing by oxygen and is inactive. FNR responsive promoters include, but are not limited to, the FNR responsive promoters listed in Table 21 and Table 22 below. Underlined sequences are predicted ribosome binding sites, and bolded sequences are restriction sites used for cloning.

TABLE 21
FNR Promoter Sequences

| FNR Responsive | |
|---|---|
| Promoter | Sequence |
| SEQ ID NO: 563 | GTCAGCATAACACCCTGACCTCTCATTAATTGTTCATGCCGGGCGGCA |
| | CTATCGTCGTCCGGCCTTTTCCTCTCTTACTCTGCTACGTACATCTATTT |
| | CTATAAATCCGTTCAATTTGTCTGTTTTTTGCACAAACATGAAATATCA |
| | GACAATTCCGTGACTTAAGAAAATTTATACAAATCAGCAATATACCCC |
| | TTAAGGAGTATATAAAGGTGAATTTGATTTACATCAATAAGCGGGGTT |
| | GCTGAATCGTTAAGGTAGGCGGTAATAGAAAAGAAATCGAGGCAAAA |
| SEQ ID NO: 564 | ATTTCCTCTCATCCCATCCGGGGTGAGAGTCTTTTCCCCCGACTTATGG |
| | CTCATGCATGCATCAAAAAAGATGTGAGCTTGATCAAAAACAAAAAA |
| | TATTTCACTCGACAGGAGTATTTATATTGCGCCCGTTACGTGGGCTTCG |
| | ACTGTAAATCAGAAAGGAGAAAACACCT |
| SEQ ID NO: 565 | GTCAGCATAACACCCTGACCTCTCATTAATTGTTCATGCCGGGCGGCA |
| | CTATCGTCGTCCGGCCTTTTCCTCTCTTACTCTGCTACGTACATCTATTT |
| | CTATAAATCCGTTCAATTTGTCTGTTTTTTGCACAAACATGAAATATCA |
| | GACAATTCCGTGACTTAAGAAAATTTATACAAATCAGCAATATACCCC |
| | TTAAGGAGTATATAAAGGTGAATTTGATTTACATCAATAAGCGGGGTT |
| | GCTGAATCGTTAAGGATCCCTCTAGAAATAATTTTGTTTAACTTTAAG |
| | AAGGAGATATACAT |
| SEQ ID NO: 566 | CATTTCCTCTCATCCCATCCGGGGTGAGAGTCTTTTCCCCCGACTTATG |
| | GCTCATGCATGCATCAAAAAAGATGTGAGCTTGATCAAAAACAAAAA |
| | ATATTTCACTCGACAGGAGTATTTATATTGCGCCCGGATCCCTCTAGA |
| | AATAATTTTGTTTAACTTTAAGAAGGAGATATACAT |
| SEQ ID NO: 567 | AGTTGTTCTTATTGGTGGTGTTGCTTTATGGTTGCATCGTAGTAAATGG |
| | TTGTAACAAAAGCAATTTTTCCGGCTGTCTGTATACAAAAACGCCGTA |
| | AAGTTTGAGCGAAGTCAATAAACTCTCTACCCATTCAGGGCAATATCT |
| | CTCTTGGATCCCTCTAGAAATAATTTTGTTTAACTTTAAGAAGGAGAT |
| | ATACAT |

TABLE 22
FNR Promoter sequences

| FNR-responsive | |
|---|---|
| regulatory region | 12345678901234567890123456789012345678901234567890 |
| SEQ ID NO: 568 | ATCCCCATCACTCTTGATGGAGATCAATTCCCCAAGCTGCTAGAGC |
| | GTTACCTTGCCCTTAAACATTAGCAATGTCGATTTATCAGAGGGCC |
| | GACAGGCTCCCACAGGAGAAAACCG |
| SEQ ID NO: 569 | CTCTTGATCGTTATCAATTCCCACGCTGTTTCAGAGCGTTACCTTGC |
| | CCTTAAACATTAGCAATGTCGATTTATCAGAGGGCCGACAGGCTCC |
| | CACAGGAGAAAACCG |
| nirB1 | GTCAGCATAACACCCTGACCTCTCATTAATTGTTCATGCCGGGCGG |
| SEQ ID NO: 570 | CACTATCGTCGTCCGGCCTTTTCCTCTCTTACTCTGCTACGTACATC |
| | TATTTCTATAAATCCGTTCAATTTGTCTGTTTTTTGCACAAACATGA |
| | AATATCAGACAATTCCGTGACTTAAGAAAATTTATACAAATCAGC |
| | AATATACCCCTTAAGGAGTATATAAAGGTGAATTTGATTTACATCA |
| | ATAAGCGGGGTTGCTGAATCGTTAAGGTAGGCGGTAATAGAAAAG |
| | AAATCGAGGCAAAA |
| nirB2 | CGGCCCGATCGTTGAACATAGCGGTCCGCAGGCGGCACTGCTTAC |
| SEQ ID NO: 571 | AGCAAACGGTCTGTACGCTGTCGTCTTTGTGATGTGCTTCCTGTTA |
| | GGTTTCGTCAGCCGTCACCGTCAGCATAACACCCTGACCTCTCATT |
| | AATTGCTCATGCCGGACGGCACTATCGTCGTCCGGCCGGCCTTTTCCTCT |
| | CTTCCCCCGCTACGTGCATCTATTTCTATAAACCCGCTCATTTTGTC |
| | TATTTTTTGCACAAACATGAAATATCAGACAATTCCGTGACTTAAG |
| | AAAATTTATACAAATCAGCAATATACCCATTAAGGAGTATATAAA |
| | GGTGAATTTGATTTACATCAATAAGCGGGGTTGCTGAATCGTTAAG |
| | GTAGGCGGTAATAGAAAAGAAATCGAGGCAAAAatgtttgtttaactttaagaa |
| | ggagatatacat |
| nirB3 | GTCAGCATAACACCCTGACCTCTCATTAATTGCTCATGCCGGACGG |
| SEQ ID NO: 572 | CACTATCGTCGTCCGGCCTTTTCCTCTCTTCCCCCGCTACGTGCATC |
| | TATTTCTATAAACCCGCTCATTTTGTCTATTTTTTGCACAAACATGA |
| | AATATCAGACAATTCCGTGACTTAAGAAAATTTATACAAATCAGC |
| | AATATACCCATTAAGGAGTATATAAAGGTGAATTTGATTTACATCA |
| | ATAAGCGGGGTTGCTGAATCGTTAAGGTAGGCGGTAATAGAAAAG |
| | AAATCGAGGCAAAA |
| ydfZ | ATTTCCTCTCATCCCATCCGGGGTGAGAGTCTTTTCCCCCGACTTAT |
| SEQ ID NO: 573 | GGCTCATGCATGCATCAAAAAAGATGTGAGCTTGATCAAAAACAA |
| | AAAATATTTCACTCGACAGGAGTATTTATATTGCGCCCGTTACGTG |
| | GGCTTCGACTGTAAATCAGAAAGGAGAAAACACCT |
| nirB+RBS | GTCAGCATAACACCCTGACCTCTCATTAATTGTTCATGCCGGGCGG |
| SEQ ID NO: 574 | CACTATCGTCGTCCGGCCTTTTCCTCTCTTACTCTGCTACGTACATC |
| | TATTTCTATAAATCCGTTCAATTTGTCTGTTTTTTGCACAAACATGA |
| | AATATCAGACAATTCCGTGACTTAAGAAAATTTATACAAATCAGC |
| | AATATACCCCTTAAGGAGTATATAAAGGTGAATTTGATTTACATCA |
| | ATAAGCGGGGTTGCTGAATCGTTAAGGATCCCTCTAGAAATAATT |
| | TTGTTTAACTTTAAGAAGGAGATATACAT |
| ydfZ+RBS | CATTTCCTCTCATCCCATCCGGGGTGAGAGTCTTTTCCCCCGACTTA |
| SEQ ID NO: 575 | TGGCTCATGCATGCATCAAAAAAGATGTGAGCTTGATCAAAAACA |
| | AAAAATATTTCACTCGACAGGAGTATTTATATTGCGCCCGGATCC |
| | CTCTAGAAATAATTTTGTTTAACTTTAAGAAGGAGATATACAT |
| fnrS1 | AGTTGTTCTTATTGGTGGTGTTGCTTTATGGTTGCATCGTAGTAAAT |
| SEQ ID NO: 576 | GGTTGTAACAAAAGCAATTTTTCCGGCTGTCTGTATACAAAAACGC |
| | CGTAAAGTTTGAGCGAAGTCAATAAACTCTCTACCCATTCAGGGC |
| | AATATCTCTCTTGGATCCCTCTAGAAATAATTTTGTTTAACTTTAA |
| | GAAGGAGATATACAT |
| fnrS2 | AGTTGTTCTTATTGGTGGTGTTGCTTTATGGTTGCATCGTAGTAAAT |
| SEQ ID NO: 577 | GGTTGTAACAAAAGCAATTTTTCCGGCTGTCTGTATACAAAAACGC |
| | CGCAAAGTTTGAGCGAAGTCAATAAACTCTCTACCCATTCAGGGC |
| | AATATCTCTCTTGGATCCAAAGTGAACTCTAGAAATAATTTTGTTT |
| | AACTTTAAGAAGGAGATATACAT |
| nirB+crp | TCGTCTTTGTGATGTGCTTCCTGTTAGGTTTCGTCAGCCGTCACCGT |
| SEQ ID NO: 578 | CAGCATAACACCCTGACCTCTCATTAATTGCTCATGCCGGACGGCA |
| | CTATCGTCGTCCGGCCTTTTCCTCTCTTCCCCCGCTACGTGCATCTA |
| | TTTCTATAAACCCGCTCATTTTGTCTATTTTTTGCACAAACATGAAA |
| | TATCAGACAATTCCGTGACTTAAGAAAATTTATACAAATCAGCAAT |
| | ATACCCATTAAGGAGTATATAAAGGTGAATTTGATTTACATCAATA |
| | AGCGGGGTTGCTGAATCGTTAAGGTAGaaatgtgatctagttcacatttGCGGTA |
| | ATAGAAAAGAAATCGAGGCAAAAatgtttgtttaactttaagaaggagatatacat |
| fnrS+crp | AGTTGTTCTTATTGGTGGTGTTGCTTTATGGTTGCATCGTAGTAAAT |
| SEQ ID NO: 579 | GGTTGTAACAAAAGCAATTTTTCCGGCTGTCTGTATACAAAAACGC |
| | CGCAAAGTTTGAGCGAAGTCAATAAACTCTCTACCCATTCAGGGC |
| | AATATCTCTCaaatgtgatctagttcacattttttgtttaactttaagaaggagatatacat |

[0745] FNR promoter sequences are known in the art, and any suitable FNR promoter sequence(s) may be used in the genetically engineered bacteria of the invention. Any suitable FNR promoter(s) may be combined with any suitable payload.

[0746] Non-limiting FNR promoter sequences are provided in Table 21 and Table 22. Table 21 and Table 22 depicts the nucleic acid sequences of exemplary regulatory region sequences comprising a FNR-responsive promoter sequence. Underlined sequences are predicted ribosome binding sites, and bolded sequences are restriction sites used for cloning. In some embodiments, the genetically engineered bacteria of the invention comprise one or more of: SEQ ID NO: 563, SEQ ID NO: 564, SEQ ID NO: 565, SEQ ID NO: 566, SEQ ID NO: 567, SEQ ID NO: 568, SEQ ID NO: 569, nirB1 promoter (SEQ ID NO: 570), nirB2 promoter (SEQ ID NO: 571), nirB3 promoter (SEQ ID NO: 572), ydfZ promoter (SEQ ID NO: 573), nirB promoter fused to a strong ribosome binding site (SEQ ID NO: 574), ydfZ promoter fused to a strong ribosome binding site (SEQ ID NO: 575), fnrS, an anaerobically induced small RNA gene (fnrS1 promoter SEQ ID NO: 576 or fnrS2 promoter SEQ ID NO: 577), nirB promoter fused to a crp binding site (SEQ ID NO: 578), and fnrS fused to a crp binding site (SEQ ID NO: 579). In some embodiments, the FNR-responsive promoter is at least about 80%, at least about 85%, at least about 90%, at least about 95%, or at least about 99% homologous to the sequence of any one of SEQ ID NOs: 563-579.

[0747] In some embodiments, multiple distinct FNR nucleic acid sequences are inserted in the genetically engineered bacteria. In alternate embodiments, the genetically engineered bacteria comprise a gene encoding a payload expressed under the control of an alternate oxygen level-dependent promoter, e.g., DNR (Trunk et al., 2010) or ANR (Ray et al., 1997). In these embodiments, expression of the payload gene is particularly activated in a low-oxygen or anaerobic environment, such as in the gut. In some embodiments, gene expression is further optimized by methods known in the art, e.g., by optimizing ribosomal binding sites and/or increasing mRNA stability. In one embodiment, the mammalian gut is a human mammalian gut.

[0748] In another embodiment, the genetically engineered bacteria comprise the gene or gene cassette for producing an anti-inflammation and/or gut barrier function enhancer molecule(s) expressed under the control of anaerobic regulation of arginine deiminiase and nitrate reduction transcriptional regulator (ANR). In P. aeruginosa, ANR is “required for the expression of physiological functions which are inducible under oxygen-limiting or anaerobic conditions” (Winteler et al., 1996; Sawers 1991). P. aeruginosa ANR is homologous with E. coli FNR, and “the consensus FNR site (TTGAT-ATCAA) was recognized efficiently by ANR and FNR” (Winteler et al., 1996). Like FNR, in the anaerobic state, ANR activates numerous genes responsible for adapting to anaerobic growth. In the aerobic state, ANR is inactive. Pseudomonas fluorescens, Pseudomonas putida, Pseudomonas syringae, and Pseudomonas mendocina all have functional analogs of ANR (Zimmermann et al., 1991). Promoters that are regulated by ANR are known in the art, e.g., the promoter of the arcDABC operon (see, e.g., Hasegawa et al., 1998).

[0749] In other embodiments, the one or more gene sequence(s) for producing a payload are expressed under the control of an oxygen level-dependent promoter fused to a binding site for a transcriptional activator, e.g., CRP. CRP (cyclic AMP receptor protein or catabolite activator protein or CAP) plays a major regulatory role in bacteria by repressing genes responsible for the uptake, metabolism, and assimilation of less favorable carbon sources when rapidly metabolizable carbohydrates, such as glucose, are present (Wu et al., 2015). This preference for glucose has been termed glucose repression, as well as carbon catabolite repression (Deutscher, 2008; Görke and Stülke, 2008). In some embodiments, the gene or gene cassette for producing an anti-inflammation and/or gut barrier function enhancer molecule(s) is controlled by an oxygen level-dependent promoter fused to a CRP binding site. In some embodiments, the one or more gene sequence(s) for a payload are controlled by a FNR promoter fused to a CRP binding site. In these embodiments, cyclic AMP binds to CRP when no glucose is present in the environment. This binding causes a conformational change in CRP, and allows CRP to bind tightly to its binding site. CRP binding then activates transcription of the gene or gene cassette by recruiting RNA polymerase to the FNR promoter via direct protein-protein interactions. In the presence of glucose, cyclic AMP does not bind to CRP and transcription of the gene or gene cassette for producing an payload is repressed. In some embodiments, an oxygen level-dependent promoter (e.g., an FNR promoter) fused to a binding site for a transcriptional activator is used to ensure that the gene or gene cassette for producing a payload is not expressed under anaerobic conditions when sufficient amounts of glucose are present, e.g., by adding glucose to growth media in vitro.

[0750] In some embodiments, the genetically engineered bacteria comprise an oxygen level-dependent promoter from a different species, strain, or substrain of bacteria. In some embodiments, the genetically engineered bacteria comprise an oxygen level-sensing transcription factor, e.g., FNR, ANR or DNR, from a different species, strain, or substrain of bacteria. In some embodiments, the genetically engineered bacteria comprise an oxygen level-sensing transcription factor and corresponding promoter from a different species, strain, or substrain of bacteria. The heterologous oxygen-level dependent transcriptional regulator and/or promoter increases the transcription of genes operably linked to said promoter, e.g., one or more gene sequence(s) for producing the payload(s) in a low-oxygen or anaerobic environment, as compared to the native gene(s) and promoter in the bacteria under the same conditions. In certain embodiments, the non-native oxygen-level dependent transcriptional regulator is an FNR protein from N. gonorrhoeae (see, e.g., Isabella et al., 2011). In some embodiments, the corresponding wild-type transcriptional regulator is left intact and retains wild-type activity. In alternate embodiments, the corresponding wild-type transcriptional regulator is deleted or mutated to reduce or eliminate wild-type activity.

[0751] In some embodiments, the genetically engineered bacteria comprise a wild-type oxygen-level dependent transcriptional regulator, e.g., FNR, ANR, or DNR, and corresponding promoter that is mutated relative to the wild-type promoter from bacteria of the same subtype. The mutated promoter enhances binding to the wild-type transcriptional regulator and increases the transcription of genes operably linked to said promoter, e.g., the gene encoding the payload, in a low-oxygen or anaerobic environment, as compared to the wild-type promoter under the same conditions. In some embodiments, the genetically engineered bacteria comprise a wild-type oxygen-level dependent promoter, e.g., FNR, ANR, or DNR promoter, and corresponding transcriptional regulator that is mutated relative to the wild-type transcriptional regulator from bacteria of the same subtype. The mutated transcriptional regulator enhances binding to the wild-type promoter and increases the transcription of genes operably linked to said promoter, e.g., the gene encoding the payload, in a low-oxygen or anaerobic environment, as compared to the wild-type transcriptional regulator under the same conditions. In certain embodiments, the mutant oxygen-level dependent transcriptional regulator is an FNR protein comprising amino acid substitutions that enhance dimerization and FNR activity (see, e.g., Moore et al., (2006). In some embodiments, both the oxygen level-sensing transcriptional regulator and corresponding promoter are mutated relative to the wild-type sequences from bacteria of the same subtype in order to increase expression of the payload in low-oxygen conditions.

[0752] In some embodiments, the bacterial cells comprise multiple copies of the endogenous gene encoding the oxygen level-sensing transcriptional regulator, e.g., the FNR gene. In some embodiments, the gene encoding the oxygen level-sensing transcriptional regulator is present on a plasmid. In some embodiments, the gene encoding the oxygen level-sensing transcriptional regulator and the gene encoding the payload are present on different plasmids. In some embodiments, the gene encoding the oxygen level-sensing transcriptional regulator and the gene encoding the payload are present on the same plasmid.

[0753] In some embodiments, the gene encoding the oxygen level-sensing transcriptional regulator is present on a chromosome. In some embodiments, the gene encoding the oxygen level-sensing transcriptional regulator and the gene encoding the payload are present on different chromosomes. In some embodiments, the gene encoding the oxygen level-sensing transcriptional regulator and the gene encoding the payload are present on the same chromosome. In some instances, it may be advantageous to express the oxygen level-sensing transcriptional regulator under the control of an inducible promoter in order to enhance expression stability. In some embodiments, expression of the transcriptional regulator is controlled by a different promoter than the promoter that controls expression of the gene encoding the payload. In some embodiments, expression of the transcriptional regulator is controlled by the same promoter that controls expression of the payload. In some embodiments, the transcriptional regulator and the payload are divergently transcribed from a promoter region

[0754] RNS-Dependent Regulation

[0755] In some embodiments, the genetically engineered bacteria or genetically engineered virus comprise a gene encoding a payload that is expressed under the control of an inducible promoter. In some embodiments, the genetically engineered bacterium or genetically engineered virus that expresses a payload under the control of a promoter that is activated by inflammatory conditions. In one embodiment, the gene for producing the payload is expressed under the control of an inflammatory-dependent promoter that is activated in inflammatory environments, e.g., a reactive nitrogen species or RNS promoter.

[0756] As used herein, “reactive nitrogen species” and “RNS” are used interchangeably to refer to highly active molecules, ions, and/or radicals derived from molecular nitrogen. RNS can cause deleterious cellular effects such as nitrosative stress. RNS includes, but is not limited to, nitric oxide (NO.), peroxynitrite or peroxynitrite anion (ONOO—), nitrogen dioxide (.NO2), dinitrogen trioxide (N2O3), peroxynitrous acid (ONOOH), and nitroperoxycarbonate (ONOOCO2-) (unpaired electrons denoted by .). Bacteria have evolved transcription factors that are capable of sensing RNS levels. Different RNS signaling pathways are triggered by different RNS levels and occur with different kinetics.

[0757] As used herein, “RNS-inducible regulatory region” refers to a nucleic acid sequence to which one or more RNS-sensing transcription factors is capable of binding, wherein the binding and/or activation of the corresponding transcription factor activates downstream gene expression; in the presence of RNS, the transcription factor binds to and/or activates the regulatory region. In some embodiments, the RNS-inducible regulatory region comprises a promoter sequence. In some embodiments, the transcription factor senses RNS and subsequently binds to the RNS-inducible regulatory region, thereby activating downstream gene expression. In alternate embodiments, the transcription factor is bound to the RNS-inducible regulatory region in the absence of RNS; in the presence of RNS, the transcription factor undergoes a conformational change, thereby activating downstream gene expression. The RNS-inducible regulatory region may be operatively linked to a gene or genes, e.g., a payload gene sequence(s), e.g., any of the payloads described herein. For example, in the presence of RNS, a transcription factor senses RNS and activates a corresponding RNS-inducible regulatory region, thereby driving expression of an operatively linked gene sequence. Thus, RNS induces expression of the gene or gene sequences.

[0758] As used herein, “RNS-derepressible regulatory region” refers to a nucleic acid sequence to which one or more RNS-sensing transcription factors is capable of binding, wherein the binding of the corresponding transcription factor represses downstream gene expression; in the presence of RNS, the transcription factor does not bind to and does not repress the regulatory region. In some embodiments, the RNS-derepressible regulatory region comprises a promoter sequence. The RNS-derepressible regulatory region may be operatively linked to a gene or genes, e.g., a payload gene sequence(s). For example, in the presence of RNS, a transcription factor senses RNS and no longer binds to and/or represses the regulatory region, thereby derepressing an operatively linked gene sequence or gene cassette. Thus, RNS derepresses expression of the gene or genes.

[0759] As used herein, “RNS-repressible regulatory region” refers to a nucleic acid sequence to which one or more RNS-sensing transcription factors is capable of binding, wherein the binding of the corresponding transcription factor represses downstream gene expression; in the presence of RNS, the transcription factor binds to and represses the regulatory region. In some embodiments, the RNS-repressible regulatory region comprises a promoter sequence. In some embodiments, the transcription factor that senses RNS is capable of binding to a regulatory region that overlaps with part of the promoter sequence. In alternate embodiments, the transcription factor that senses RNS is capable of binding to a regulatory region that is upstream or downstream of the promoter sequence. The RNS-repressible regulatory region may be operatively linked to a gene sequence or gene cassette. For example, in the presence of RNS, a transcription factor senses RNS and binds to a corresponding RNS-repressible regulatory region, thereby blocking expression of an operatively linked gene sequence or gene sequences. Thus, RNS represses expression of the gene or gene sequences.

[0760] As used herein, a “RNS-responsive regulatory region” refers to a RNS-inducible regulatory region, a RNS-repressible regulatory region, and/or a RNS-derepressible regulatory region. In some embodiments, the RNS-responsive regulatory region comprises a promoter sequence. Each regulatory region is capable of binding at least one corresponding RNS-sensing transcription factor. Examples of transcription factors that sense RNS and their corresponding RNS-responsive genes, promoters, and/or regulatory regions include, but are not limited to, those shown in Table 23.

TABLE 23
Examples of RNS-sensing transcription
factors and RNS-responsive genes

| RNS-sensing | Primarily | Examples of responsive genes, |
|---|---|---|
| transcription | capable | promoters, and/or regulatory |
| factor: | of sensing: | regions: |
| NsrR | NO | norB, aniA, nsrR, hmpA, ytfE, ygbA, |
| | | hcp, hcr, nrfA, aox |
| NorR | NO | norVW, norR |
| DNR | NO | norCB, nir, nor, nos |

[0761] In some embodiments, the genetically engineered bacteria of the invention comprise a tunable regulatory region that is directly or indirectly controlled by a transcription factor that is capable of sensing at least one reactive nitrogen species. The tunable regulatory region is operatively linked to a gene or genes capable of directly or indirectly driving the expression of a payload, thus controlling expression of the payload relative to RNS levels. For example, the tunable regulatory region is a RNS-inducible regulatory region, and the payload is a payload, such as any of the payloads provided herein; when RNS is present, e.g., in an inflamed tissue, a RNS-sensing transcription factor binds to and/or activates the regulatory region and drives expression of the payload gene or genes. Subsequently, when inflammation is ameliorated, RNS levels are reduced, and production of the payload is decreased or eliminated.

[0762] In some embodiments, the tunable regulatory region is a RNS-inducible regulatory region; in the presence of RNS, a transcription factor senses RNS and activates the RNS-inducible regulatory region, thereby driving expression of an operatively linked gene or genes. In some embodiments, the transcription factor senses RNS and subsequently binds to the RNS-inducible regulatory region, thereby activating downstream gene expression. In alternate embodiments, the transcription factor is bound to the RNS-inducible regulatory region in the absence of RNS; when the transcription factor senses RNS, it undergoes a conformational change, thereby inducing downstream gene expression.

[0763] In some embodiments, the tunable regulatory region is a RNS-inducible regulatory region, and the transcription factor that senses RNS is NorR. NorR “is an NO-responsive transcriptional activator that regulates expression of the norVW genes encoding flavorubredoxin and an associated flavoprotein, which reduce NO to nitrous oxide” (Spiro 2006). The genetically engineered bacteria of the invention may comprise any suitable RNS-responsive regulatory region from a gene that is activated by NorR. Genes that are capable of being activated by NorR are known in the art (see, e.g., Spiro 2006; Vine et al., 2011; Karlinsey et al., 2012). In certain embodiments, the genetically engineered bacteria of the invention comprise a RNS-inducible regulatory region from norVW that is operatively linked to a gene or genes, e.g., one or more payload gene sequence(s). In the presence of RNS, a NorR transcription factor senses RNS and activates to the norVW regulatory region, thereby driving expression of the operatively linked gene(s) and producing the payload(s).

[0764] In some embodiments, the tunable regulatory region is a RNS-inducible regulatory region, and the transcription factor that senses RNS is DNR. DNR (dissimilatory nitrate respiration regulator) “promotes the expression of the nir, the nor and the nos genes” in the presence of nitric oxide (Castiglione et al., 2009). The genetically engineered bacteria of the invention may comprise any suitable RNS-responsive regulatory region from a gene that is activated by DNR. Genes that are capable of being activated by DNR are known in the art (see, e.g., Castiglione et al., 2009; Giardina et al., 2008). In certain embodiments, the genetically engineered bacteria of the invention comprise a RNS-inducible regulatory region from norCB that is operatively linked to a gene or gene cassette, e.g., a butyrogenic gene cassette. In the presence of RNS, a DNR transcription factor senses RNS and activates to the norCB regulatory region, thereby driving expression of the operatively linked gene or genes and producing one or more payloads. In some embodiments, the DNR is Pseudomonas aeruginosa DNR.

[0765] In another embodiment, the genetically engineered bacteria comprise the gene or gene cassette for producing an anti-inflammation and/or gut barrier function enhancer molecule(s) expressed under the control of the dissimilatory nitrate respiration regulator (DNR). DNR is a member of the FNR family (Arai et al., 1995) and is a transcriptional regulator that is required in conjunction with ANR for “anaerobic nitrate respiration of Pseudomonas aeruginosa” (Hasegawa et al., 1998). For certain genes, the FNR-binding motifs “are probably recognized only by DNR” (Hasegawa et al., 1998). Any suitable transcriptional regulator that is controlled by exogenous environmental conditions and corresponding regulatory region may be used. Non-limiting examples include ArcA/B, ResD/E, NreA/B/C, and AirSR, and others are known in the art.

[0766] In some embodiments, the tunable regulatory region is a RNS-derepressible regulatory region, and binding of a corresponding transcription factor represses downstream gene expression; in the presence of RNS, the transcription factor no longer binds to the regulatory region, thereby derepressing the operatively linked gene or gene cassette.

[0767] In some embodiments, the tunable regulatory region is a RNS-derepressible regulatory region, and the transcription factor that senses RNS is NsrR. NsrR is “an Rrf2-type transcriptional repressor [that] can sense NO and control the expression of genes responsible for NO metabolism” (Isabella et al., 2009). The genetically engineered bacteria of the invention may comprise any suitable RNS-responsive regulatory region from a gene that is repressed by NsrR. In some embodiments, the NsrR is Neisseria gonorrhoeae NsrR. Genes that are capable of being repressed by NsrR are known in the art (see, e.g., Isabella et al., 2009; Dunn et al., 2010). In certain embodiments, the genetically engineered bacteria of the invention comprise a RNS-derepressible regulatory region from norB that is operatively linked to a gene or genes, e.g., a payload gene or genes. In the presence of RNS, an NsrR transcription factor senses RNS and no longer binds to the norB regulatory region, thereby derepressing the operatively linked a payload gene or genes and producing the encoding a payload(s).

[0768] In some embodiments, it is advantageous for the genetically engineered bacteria to express a RNS-sensing transcription factor that does not regulate the expression of a significant number of native genes in the bacteria. In some embodiments, the genetically engineered bacterium of the invention expresses a RNS-sensing transcription factor from a different species, strain, or substrain of bacteria, wherein the transcription factor does not bind to regulatory sequences in the genetically engineered bacterium of the invention. In some embodiments, the genetically engineered bacterium of the invention is Escherichia coli, and the RNS-sensing transcription factor is NsrR, e.g., from is Neisseria gonorrhoeae, wherein the Escherichia coli does not comprise binding sites for said NsrR. In some embodiments, the heterologous transcription factor minimizes or eliminates off-target effects on endogenous regulatory regions and genes in the genetically engineered bacteria.

[0769] In some embodiments, the tunable regulatory region is a RNS-repressible regulatory region, and binding of a corresponding transcription factor represses downstream gene expression; in the presence of RNS, the transcription factor senses RNS and binds to the RNS-repressible regulatory region, thereby repressing expression of the operatively linked gene or gene cassette. In some embodiments, the RNS-sensing transcription factor is capable of binding to a regulatory region that overlaps with part of the promoter sequence. In alternate embodiments, the RNS-sensing transcription factor is capable of binding to a regulatory region that is upstream or downstream of the promoter sequence.

[0770] In these embodiments, the genetically engineered bacteria may comprise a two repressor activation regulatory circuit, which is used to express a payload. The two repressor activation regulatory circuit comprises a first RNS-sensing repressor and a second repressor, which is operatively linked to a gene or gene cassette, e.g., encoding a payload. In one aspect of these embodiments, the RNS-sensing repressor inhibits transcription of the second repressor, which inhibits the transcription of the gene or gene cassette. Examples of second repressors useful in these embodiments, include, but are not limited to, TetR, C1, and LexA. In the absence of binding by the first repressor (which occurs in the absence of RNS), the second repressor is transcribed, which represses expression of the gene or genes. In the presence of binding by the first repressor (which occurs in the presence of RNS), expression of the second repressor is repressed, and the gene or genes, e.g., a payload gene or genes is expressed.

[0771] A RNS-responsive transcription factor may induce, derepress, or repress gene expression depending upon the regulatory region sequence used in the genetically engineered bacteria. One or more types of RNS-sensing transcription factors and corresponding regulatory region sequences may be present in genetically engineered bacteria. In some embodiments, the genetically engineered bacteria comprise one type of RNS-sensing transcription factor, e.g., NsrR, and one corresponding regulatory region sequence, e.g., from norB. In some embodiments, the genetically engineered bacteria comprise one type of RNS-sensing transcription factor, e.g., NsrR, and two or more different corresponding regulatory region sequences, e.g., from norB and aniA. In some embodiments, the genetically engineered bacteria comprise two or more types of RNS-sensing transcription factors, e.g., NsrR and NorR, and two or more corresponding regulatory region sequences, e.g., from norB and norR, respectively. One RNS-responsive regulatory region may be capable of binding more than one transcription factor. In some embodiments, the genetically engineered bacteria comprise two or more types of RNS-sensing transcription factors and one corresponding regulatory region sequence. Nucleic acid sequences of several RNS-regulated regulatory regions are known in the art (see, e.g., Spiro 2006; Isabella et al., 2009; Dunn et al., 2010; Vine et al., 2011; Karlinsey et al., 2012).

[0772] In some embodiments, the genetically engineered bacteria of the invention comprise a gene encoding a RNS-sensing transcription factor, e.g., the nsrR gene, that is controlled by its native promoter, an inducible promoter, a promoter that is stronger than the native promoter, e.g., the GlnRS promoter or the P(Bla) promoter, or a constitutive promoter. In some instances, it may be advantageous to express the RNS-sensing transcription factor under the control of an inducible promoter in order to enhance expression stability. In some embodiments, expression of the RNS-sensing transcription factor is controlled by a different promoter than the promoter that controls expression of the therapeutic molecule. In some embodiments, expression of the RNS-sensing transcription factor is controlled by the same promoter that controls expression of the therapeutic molecule. In some embodiments, the RNS-sensing transcription factor and therapeutic molecule are divergently transcribed from a promoter region.

[0773] In some embodiments, the genetically engineered bacteria of the invention comprise a gene for a RNS-sensing transcription factor from a different species, strain, or substrain of bacteria. In some embodiments, the genetically engineered bacteria comprise a RNS-responsive regulatory region from a different species, strain, or substrain of bacteria. In some embodiments, the genetically engineered bacteria comprise a RNS-sensing transcription factor and corresponding RNS-responsive regulatory region from a different species, strain, or substrain of bacteria. The heterologous RNS-sensing transcription factor and regulatory region may increase the transcription of genes operatively linked to said regulatory region in the presence of RNS, as compared to the native transcription factor and regulatory region from bacteria of the same subtype under the same conditions.

[0774] In some embodiments, the genetically engineered bacteria comprise a RNS-sensing transcription factor, NsrR, and corresponding regulatory region, nsrR, from Neisseria gonorrhoeae. In some embodiments, the native RNS-sensing transcription factor, e.g., NsrR, is left intact and retains wild-type activity. In alternate embodiments, the native RNS-sensing transcription factor, e.g., NsrR, is deleted or mutated to reduce or eliminate wild-type activity.

[0775] In some embodiments, the genetically engineered bacteria of the invention comprise multiple copies of the endogenous gene encoding the RNS-sensing transcription factor, e.g., the nsrR gene. In some embodiments, the gene encoding the RNS-sensing transcription factor is present on a plasmid. In some embodiments, the gene encoding the RNS-sensing transcription factor and the gene or gene cassette for producing the therapeutic molecule are present on different plasmids. In some embodiments, the gene encoding the RNS-sensing transcription factor and the gene or gene cassette for producing the therapeutic molecule are present on the same plasmid. In some embodiments, the gene encoding the RNS-sensing transcription factor is present on a chromosome. In some embodiments, the gene encoding the RNS-sensing transcription factor and the gene or gene cassette for producing the therapeutic molecule are present on different chromosomes. In some embodiments, the gene encoding the RNS-sensing transcription factor and the gene or gene cassette for producing the therapeutic molecule are present on the same chromosome.

[0776] In some embodiments, the genetically engineered bacteria comprise a wild-type gene encoding a RNS-sensing transcription factor, e.g., the NsrR gene, and a corresponding regulatory region, e.g., a norB regulatory region, that is mutated relative to the wild-type regulatory region from bacteria of the same subtype. The mutated regulatory region increases the expression of the payload in the presence of RNS, as compared to the wild-type regulatory region under the same conditions. In some embodiments, the genetically engineered bacteria comprise a wild-type RNS-responsive regulatory region, e.g., the norB regulatory region, and a corresponding transcription factor, e.g., NsrR, that is mutated relative to the wild-type transcription factor from bacteria of the same subtype. The mutant transcription factor increases the expression of the payload in the presence of RNS, as compared to the wild-type transcription factor under the same conditions. In some embodiments, both the RNS-sensing transcription factor and corresponding regulatory region are mutated relative to the wild-type sequences from bacteria of the same subtype in order to increase expression of the payload in the presence of RNS.

[0777] In some embodiments, the gene or gene cassette for producing the anti-inflammation and/or gut barrier function enhancer molecule(s) is present on a plasmid and operably linked to a promoter that is induced by RNS. In some embodiments, expression is further optimized by methods known in the art, e.g., by optimizing ribosomal binding sites, manipulating transcriptional regulators, and/or increasing mRNA stability.

[0778] In some embodiments, any of the gene(s) of the present disclosure may be integrated into the bacterial chromosome at one or more integration sites. For example, one or more copies of one or more encoding a payload gene(s) may be integrated into the bacterial chromosome. Having multiple copies of the gene or gen(s) integrated into the chromosome allows for greater production of the payload(s) and also permits fine-tuning of the level of expression. Alternatively, different circuits described herein, such as any of the secretion or exporter circuits, in addition to the therapeutic gene(s) or gene cassette(s) could be integrated into the bacterial chromosome at one or more different integration sites to perform multiple different functions.

[0779] In some embodiments, the genetically engineered bacteria of the invention produce at least one payload in the presence of RNS to reduce local gut inflammation by at least about 1.5-fold, at least about 2-fold, at least about 10-fold, at least about 15-fold, at least about 20-fold, at least about 30-fold, at least about 50-fold, at least about 100-fold, at least about 200-fold, at least about 300-fold, at least about 400-fold, at least about 500-fold, at least about 600-fold, at least about 700-fold, at least about 800-fold, at least about 900-fold, at least about 1,000-fold, or at least about 1,500-fold as compared to unmodified bacteria of the same subtype under the same conditions. Inflammation may be measured by methods known in the art, e.g., counting disease lesions using endoscopy; detecting T regulatory cell differentiation in peripheral blood, e.g., by fluorescence activated sorting; measuring T regulatory cell levels; measuring cytokine levels; measuring areas of mucosal damage; assaying inflammatory biomarkers, e.g., by qPCR; PCR arrays; transcription factor phosphorylation assays; immunoassays; and/or cytokine assay kits (Mesoscale, Cayman Chemical, Qiagen).

[0780] In some embodiments, the genetically engineered bacteria produce at least about 1.5-fold, at least about 2-fold, at least about 10-fold, at least about 15-fold, at least about 20-fold, at least about 30-fold, at least about 50-fold, at least about 100-fold, at least about 200-fold, at least about 300-fold, at least about 400-fold, at least about 500-fold, at least about 600-fold, at least about 700-fold, at least about 800-fold, at least about 900-fold, at least about 1,000-fold, or at least about 1,500-fold more of payload in the presence of RNS than unmodified bacteria of the same subtype under the same conditions. Certain unmodified bacteria will not have detectable levels of the payload. In embodiments using genetically modified forms of these bacteria, payload will be detectable in the presence of RNS

[0781] ROS-Dependent Regulation

[0782] In some embodiments, the genetically engineered bacteria or genetically engineered virus comprise a gene for producing a payload that is expressed under the control of an inducible promoter. In some embodiments, the genetically engineered bacterium or genetically engineered virus that expresses a payload under the control of a promoter that is activated by conditions of cellular damage. In one embodiment, the gene for producing the payload is expressed under the control of an cellular damaged-dependent promoter that is activated in environments in which there is cellular or tissue damage, e.g., a reactive oxygen species or ROS promoter.

[0783] As used herein, “reactive oxygen species” and “ROS” are used interchangeably to refer to highly active molecules, ions, and/or radicals derived from molecular oxygen. ROS can be produced as byproducts of aerobic respiration or metal-catalyzed oxidation and may cause deleterious cellular effects such as oxidative damage. ROS includes, but is not limited to, hydrogen peroxide (H2O2), organic peroxide (ROOH), hydroxyl ion (OH—), hydroxyl radical (.OH), superoxide or superoxide anion (.O2-), singlet oxygen (1O2), ozone (O3), carbonate radical, peroxide or peroxyl radical (.O2-2), hypochlorous acid (HOCl), hypochlorite ion (OCl—), sodium hypochlorite (NaOCl), nitric oxide (NO.), and peroxynitrite or peroxynitrite anion (ONOO—) (unpaired electrons denoted by .). Bacteria have evolved transcription factors that are capable of sensing ROS levels. Different ROS signaling pathways are triggered by different ROS levels and occur with different kinetics (Marinho et al., 2014).

[0784] As used herein, “ROS-inducible regulatory region” refers to a nucleic acid sequence to which one or more ROS-sensing transcription factors is capable of binding, wherein the binding and/or activation of the corresponding transcription factor activates downstream gene expression; in the presence of ROS, the transcription factor binds to and/or activates the regulatory region. In some embodiments, the ROS-inducible regulatory region comprises a promoter sequence. In some embodiments, the transcription factor senses ROS and subsequently binds to the ROS-inducible regulatory region, thereby activating downstream gene expression. In alternate embodiments, the transcription factor is bound to the ROS-inducible regulatory region in the absence of ROS; in the presence of ROS, the transcription factor undergoes a conformational change, thereby activating downstream gene expression. The ROS-inducible regulatory region may be operatively linked to a gene sequence or gene sequence, e.g., a sequence or sequences encoding one or more payload(s). For example, in the presence of ROS, a transcription factor, e.g., OxyR, senses ROS and activates a corresponding ROS-inducible regulatory region, thereby driving expression of an operatively linked gene sequence or gene sequences. Thus, ROS induces expression of the gene or genes.

[0785] As used herein, “ROS-derepressible regulatory region” refers to a nucleic acid sequence to which one or more ROS-sensing transcription factors is capable of binding, wherein the binding of the corresponding transcription factor represses downstream gene expression; in the presence of ROS, the transcription factor does not bind to and does not repress the regulatory region. In some embodiments, the ROS-derepressible regulatory region comprises a promoter sequence. The ROS-derepressible regulatory region may be operatively linked to a gene or genes, e.g., one or more genes encoding one or more payload(s). For example, in the presence of ROS, a transcription factor, e.g., OhrR, senses ROS and no longer binds to and/or represses the regulatory region, thereby derepressing an operatively linked gene sequence or gene cassette. Thus, ROS derepresses expression of the gene or gene cassette.

[0786] As used herein, “ROS-repressible regulatory region” refers to a nucleic acid sequence to which one or more ROS-sensing transcription factors is capable of binding, wherein the binding of the corresponding transcription factor represses downstream gene expression; in the presence of ROS, the transcription factor binds to and represses the regulatory region. In some embodiments, the ROS-repressible regulatory region comprises a promoter sequence. In some embodiments, the transcription factor that senses ROS is capable of binding to a regulatory region that overlaps with part of the promoter sequence. In alternate embodiments, the transcription factor that senses ROS is capable of binding to a regulatory region that is upstream or downstream of the promoter sequence. The ROS-repressible regulatory region may be operatively linked to a gene sequence or gene sequences. For example, in the presence of ROS, a transcription factor, e.g., PerR, senses ROS and binds to a corresponding ROS-repressible regulatory region, thereby blocking expression of an operatively linked gene sequence or gene sequences. Thus, ROS represses expression of the gene or genes.

[0787] As used herein, a “ROS-responsive regulatory region” refers to a ROS-inducible regulatory region, a ROS-repressible regulatory region, and/or a ROS-derepressible regulatory region. In some embodiments, the ROS-responsive regulatory region comprises a promoter sequence. Each regulatory region is capable of binding at least one corresponding ROS-sensing transcription factor. Examples of transcription factors that sense ROS and their corresponding ROS-responsive genes, promoters, and/or regulatory regions include, but are not limited to, those shown in Table 24.

TABLE 24
Examples of ROS-sensing transcription
factors and ROS-responsive genes

| ROS-sensing | Primarily | Examples of responsive genes, |
|---|---|---|
| transcription | capable | promoters, and/or regulatory |
| factor: | of sensing: | regions: |
| OxyR | H₂O₂ | ahpC; ahpF; dps; dsbG; fhuF; flu; |
| | | fur; gor; grxA; hemH; katG; oxyS; |
| | | sufA; sufB; sufC; sufD; sufE; sufS; |
| | | trxC; uxuA; yaaA; yaeH; yaiA; ybjM; |
| | | ydcH; ydeN; ygaQ; yljA; ytfK |
| PerR | H₂O₂ | katA; ahpCF; mrgA; zoaA; fur; |
| | | hemAXCDBL; srfA |
| OhrR | Organic peroxides | ohrA |
| | NaOCl | |
| SoxR | •O₂⁻ | soxS |
| | NO• | |
| | (also capable of | |
| | sensing H₂O₂) | |
| RosR | H₂O₂ | rbtT; tnp16a; rluC1; tnp5a; mscL; |
| | | tnp2d; phoD; tnp15b; pstA; tnp5b; |
| | | xylC; gabD1; rluC2; cgtS9; azlC; |
| | | narKGHJI; rosR |

[0788] In some embodiments, the genetically engineered bacteria comprise a tunable regulatory region that is directly or indirectly controlled by a transcription factor that is capable of sensing at least one reactive oxygen species. The tunable regulatory region is operatively linked to a gene or gene cassette capable of directly or indirectly driving the expression of a payload, thus controlling expression of the payload relative to ROS levels. For example, the tunable regulatory region is a ROS-inducible regulatory region, and the molecule is a payload; when ROS is present, e.g., in an inflamed tissue, a ROS-sensing transcription factor binds to and/or activates the regulatory region and drives expression of the gene sequence for the payload, thereby producing the payload. Subsequently, when inflammation is ameliorated, ROS levels are reduced, and production of the payload is decreased or eliminated.

[0789] In some embodiments, the tunable regulatory region is a ROS-inducible regulatory region; in the presence of ROS, a transcription factor senses ROS and activates the ROS-inducible regulatory region, thereby driving expression of an operatively linked gene or gene cassette. In some embodiments, the transcription factor senses ROS and subsequently binds to the ROS-inducible regulatory region, thereby activating downstream gene expression. In alternate embodiments, the transcription factor is bound to the ROS-inducible regulatory region in the absence of ROS; when the transcription factor senses ROS, it undergoes a conformational change, thereby inducing downstream gene expression.

[0790] In some embodiments, the tunable regulatory region is a ROS-inducible regulatory region, and the transcription factor that senses ROS is OxyR. OxyR “functions primarily as a global regulator of the peroxide stress response” and is capable of regulating dozens of genes, e.g., “genes involved in H2O2 detoxification (katE, ahpCF), heme biosynthesis (hemH), reductant supply (grxA, gor, trxC), thiol-disulfide isomerization (dsbG), Fe—S center repair (sufA-E, sufS), iron binding (yaaA), repression of iron import systems (fur)” and “OxyS, a small regulatory RNA” (Dubbs et al., 2012). The genetically engineered bacteria may comprise any suitable ROS-responsive regulatory region from a gene that is activated by OxyR. Genes that are capable of being activated by OxyR are known in the art (see, e.g., Zheng et al., 2001; Dubbs et al., 2012). In certain embodiments, the genetically engineered bacteria of the invention comprise a ROS-inducible regulatory region from oxyS that is operatively linked to a gene, e.g., a payload gene. In the presence of ROS, e.g., H2O2, an OxyR transcription factor senses ROS and activates to the oxyS regulatory region, thereby driving expression of the operatively linked payload gene and producing the payload. In some embodiments, OxyR is encoded by an E. coli oxyR gene. In some embodiments, the oxyS regulatory region is an E. coli oxyS regulatory region. In some embodiments, the ROS-inducible regulatory region is selected from the regulatory region of katG, dps, and ahpC.

[0791] In alternate embodiments, the tunable regulatory region is a ROS-inducible regulatory region, and the corresponding transcription factor that senses ROS is SoxR. When SoxR is “activated by oxidation of its [2Fe-2S] cluster, it increases the synthesis of SoxS, which then activates its target gene expression” (Koo et al., 2003). “SoxR is known to respond primarily to superoxide and nitric oxide” (Koo et al., 2003), and is also capable of responding to H2O2. The genetically engineered bacteria of the invention may comprise any suitable ROS-responsive regulatory region from a gene that is activated by SoxR. Genes that are capable of being activated by SoxR are known in the art (see, e.g., Koo et al., 2003). In certain embodiments, the genetically engineered bacteria of the invention comprise a ROS-inducible regulatory region from soxS that is operatively linked to a gene, e.g., a payload. In the presence of ROS, the SoxR transcription factor senses ROS and activates the soxS regulatory region, thereby driving expression of the operatively linked a payload gene and producing the a payload.

[0792] In some embodiments, the tunable regulatory region is a ROS-derepressible regulatory region, and binding of a corresponding transcription factor represses downstream gene expression; in the presence of ROS, the transcription factor no longer binds to the regulatory region, thereby derepressing the operatively linked gene or gene cassette.

[0793] In some embodiments, the tunable regulatory region is a ROS-derepressible regulatory region, and the transcription factor that senses ROS is OhrR. OhrR “binds to a pair of inverted repeat DNA sequences overlapping the ohrA promoter site and thereby represses the transcription event,” but oxidized OhrR is “unable to bind its DNA target” (Duarte et al., 2010). OhrR is a “transcriptional repressor [that] . . . senses both organic peroxides and NaOCl” (Dubbs et al., 2012) and is “weakly activated by H₂O₂ but it shows much higher reactivity for organic hydroperoxides” (Duarte et al., 2010). The genetically engineered bacteria of the invention may comprise any suitable ROS-responsive regulatory region from a gene that is repressed by OhrR. Genes that are capable of being repressed by OhrR are known in the art (see, e.g., Dubbs et al., 2012). In certain embodiments, the genetically engineered bacteria of the invention comprise a ROS-derepressible regulatory region from ohrA that is operatively linked to a gene or gene cassette, e.g., a payload gene. In the presence of ROS, e.g., NaOCl, an OhrR transcription factor senses ROS and no longer binds to the ohrA regulatory region, thereby derepressing the operatively linked payload gene and producing the a payload.

[0794] OhrR is a member of the MarR family of ROS-responsive regulators. “Most members of the MarR family are transcriptional repressors and often bind to the −10 or −35 region in the promoter causing a steric inhibition of RNA polymerase binding” (Bussmann et al., 2010). Other members of this family are known in the art and include, but are not limited to, OspR, MgrA, RosR, and SarZ. In some embodiments, the transcription factor that senses ROS is OspR, MgRA, RosR, and/or SarZ, and the genetically engineered bacteria of the invention comprises one or more corresponding regulatory region sequences from a gene that is repressed by OspR, MgRA, RosR, and/or SarZ. Genes that are capable of being repressed by OspR, MgRA, RosR, and/or SarZ are known in the art (see, e.g., Dubbs et al., 2012).

[0795] In some embodiments, the tunable regulatory region is a ROS-derepressible regulatory region, and the corresponding transcription factor that senses ROS is RosR. RosR is “a MarR-type transcriptional regulator” that binds to an “18-bp inverted repeat with the consensus sequence TTGTTGAYRYRTCAACWA” and is “reversibly inhibited by the oxidant H2O2” (Bussmann et al., 2010). RosR is capable of repressing numerous genes and putative genes, including but not limited to “a putative polyisoprenoid-binding protein (cg1322, gene upstream of and divergent from rosR), a sensory histidine kinase (cgtS9), a putative transcriptional regulator of the Crp/FNR family (cg3291), a protein of the glutathione S-transferase family (cg1426), two putative FMN reductases (cg1150 and cg1850), and four putative monooxygenases (cg0823, cg1848, cg2329, and cg3084)” (Bussmann et al., 2010). The genetically engineered bacteria of the invention may comprise any suitable ROS-responsive regulatory region from a gene that is repressed by RosR. Genes that are capable of being repressed by RosR are known in the art (see, e.g., Bussmann et al., 2010). In certain embodiments, the genetically engineered bacteria of the invention comprise a ROS-derepressible regulatory region from cgtS9 that is operatively linked to a gene or gene cassette, e.g., a payload. In the presence of ROS, e.g., H2O2, a RosR transcription factor senses ROS and no longer binds to the cgtS9 regulatory region, thereby derepressing the operatively linked payload gene and producing the payload.

[0796] In some embodiments, it is advantageous for the genetically engineered bacteria to express a ROS-sensing transcription factor that does not regulate the expression of a significant number of native genes in the bacteria. In some embodiments, the genetically engineered bacterium of the invention expresses a ROS-sensing transcription factor from a different species, strain, or substrain of bacteria, wherein the transcription factor does not bind to regulatory sequences in the genetically engineered bacterium of the invention. In some embodiments, the genetically engineered bacterium of the invention is Escherichia coli, and the ROS-sensing transcription factor is RosR, e.g., from Corynebacterium glutamicum, wherein the Escherichia coli does not comprise binding sites for said RosR. In some embodiments, the heterologous transcription factor minimizes or eliminates off-target effects on endogenous regulatory regions and genes in the genetically engineered bacteria.

[0797] In some embodiments, the tunable regulatory region is a ROS-repressible regulatory region, and binding of a corresponding transcription factor represses downstream gene expression; in the presence of ROS, the transcription factor senses ROS and binds to the ROS-repressible regulatory region, thereby repressing expression of the operatively linked gene or gene cassette. In some embodiments, the ROS-sensing transcription factor is capable of binding to a regulatory region that overlaps with part of the promoter sequence. In alternate embodiments, the ROS-sensing transcription factor is capable of binding to a regulatory region that is upstream or downstream of the promoter sequence.

[0798] In some embodiments, the tunable regulatory region is a ROS-repressible regulatory region, and the transcription factor that senses ROS is PerR. In Bacillus subtilis, PerR “when bound to DNA, represses the genes coding for proteins involved in the oxidative stress response (katA, ahpC, and mrgA), metal homeostasis (hemAXCDBL, fur, and zoaA) and its own synthesis (perR)” (Marinho et al., 2014). PerR is a “global regulator that responds primarily to H2O2” (Dubbs et al., 2012) and “interacts with DNA at the per box, a specific palindromic consensus sequence (TTATAATNATTATAA) residing within and near the promoter sequences of PerR-controlled genes” (Marinho et al., 2014). PerR is capable of binding a regulatory region that “overlaps part of the promoter or is immediately downstream from it” (Dubbs et al., 2012). The genetically engineered bacteria of the invention may comprise any suitable ROS-responsive regulatory region from a gene that is repressed by PerR. Genes that are capable of being repressed by PerR are known in the art (see, e.g., Dubbs et al., 2012).

[0799] In these embodiments, the genetically engineered bacteria may comprise a two repressor activation regulatory circuit, which is used to express a payload. The two repressor activation regulatory circuit comprises a first ROS-sensing repressor, e.g., PerR, and a second repressor, e.g., TetR, which is operatively linked to a gene or gene cassette, e.g., a payload. In one aspect of these embodiments, the ROS-sensing repressor inhibits transcription of the second repressor, which inhibits the transcription of the gene or gene cassette. Examples of second repressors useful in these embodiments include, but are not limited to, TetR, C1, and LexA. In some embodiments, the ROS-sensing repressor is PerR. In some embodiments, the second repressor is TetR. In this embodiment, a PerR-repressible regulatory region drives expression of TetR, and a TetR-repressible regulatory region drives expression of the gene or gene cassette, e.g., a payload. In the absence of PerR binding (which occurs in the absence of ROS), tetR is transcribed, and TetR represses expression of the gene or gene cassette, e.g., a payload. In the presence of PerR binding (which occurs in the presence of ROS), tetR expression is repressed, and the gene or gene cassette, e.g., a payload, is expressed.

[0800] A ROS-responsive transcription factor may induce, derepress, or repress gene expression depending upon the regulatory region sequence used in the genetically engineered bacteria. For example, although “OxyR is primarily thought of as a transcriptional activator under oxidizing conditions . . . OxyR can function as either a repressor or activator under both oxidizing and reducing conditions” (Dubbs et al., 2012), and OxyR “has been shown to be a repressor of its own expression as well as that of fhuF (encoding a ferric ion reductase) and flu (encoding the antigen 43 outer membrane protein)” (Zheng et al., 2001). The genetically engineered bacteria of the invention may comprise any suitable ROS-responsive regulatory region from a gene that is repressed by OxyR. In some embodiments, OxyR is used in a two repressor activation regulatory circuit, as described above. Genes that are capable of being repressed by OxyR are known in the art (see, e.g., Zheng et al., 2001). Or, for example, although RosR is capable of repressing a number of genes, it is also capable of activating certain genes, e.g., the narKGHJI operon. In some embodiments, the genetically engineered bacteria comprise any suitable ROS-responsive regulatory region from a gene that is activated by RosR. In addition, “PerR-mediated positive regulation has also been observed . . . and appears to involve PerR binding to distant upstream sites” (Dubbs et al., 2012). In some embodiments, the genetically engineered bacteria comprise any suitable ROS-responsive regulatory region from a gene that is activated by PerR.

[0801] One or more types of ROS-sensing transcription factors and corresponding regulatory region sequences may be present in genetically engineered bacteria. For example, “OhrR is found in both Gram-positive and Gram-negative bacteria and can coreside with either OxyR or PerR or both” (Dubbs et al., 2012). In some embodiments, the genetically engineered bacteria comprise one type of ROS-sensing transcription factor, e.g., OxyR, and one corresponding regulatory region sequence, e.g., from oxyS. In some embodiments, the genetically engineered bacteria comprise one type of ROS-sensing transcription factor, e.g., OxyR, and two or more different corresponding regulatory region sequences, e.g., from oxyS and katG. In some embodiments, the genetically engineered bacteria comprise two or more types of ROS-sensing transcription factors, e.g., OxyR and PerR, and two or more corresponding regulatory region sequences, e.g., from oxyS and katA, respectively. One ROS-responsive regulatory region may be capable of binding more than one transcription factor. In some embodiments, the genetically engineered bacteria comprise two or more types of ROS-sensing transcription factors and one corresponding regulatory region sequence.

[0802] Nucleic acid sequences of several exemplary OxyR-regulated regulatory regions are shown in Table 25. OxyR binding sites are underlined and bolded. In some embodiments, genetically engineered bacteria comprise a nucleic acid sequence that is at least about 80%, at least about 85%, at least about 90%, at least about 95%, or at least about 99% homologous to the DNA sequence of SEQ ID NO: 580, SEQ ID NO: 581, SEQ ID NO: 582, or SEQ ID NO: 583, or a functional fragment thereof.

TABLE 25
Nucleotide sequences of exemplary OxyR-regulated regulatory regions

| Regulatory | |
|---|---|
| sequence | Sequence |
| katG | TGTGGCTTTTATGAAAATCACACAGTGATCACAAATTTTAAACA |
| (SEQ ID NO: 580) | GAGCACAAAATGCTGCCTCGAAATGAGGGCGGGAAAATAAGGT |
| | TATCAGCCTTGTTTTCTCCCTCATTACTTGAAGGATATGAAGCTA |
| | AAACCCTTTTTTATAAAGCATTTGTCCGAATTCGGACATAATCA |
| | AAAAAGCTTAATTAAGATCAATTTGATCTACATCTCTTTAACCA |
| | ACAATATGTAAGATCTCAACTATCGCATCCGTGGATTAATTCAA |
| | TTATAACTTCTCTCTAACGCTGTGTATCGTAACGGTAACACTGTA |
| | GAGGGGAGCACATTGATGCGAATTCATTAAAGAGGAGAAAGGT |
| | ACC |
| dps | TTCCGAAAATTCCTGGCGAGCAGATAAATAAGAATTGTTCTTAT |
| (SEQ ID NO: 581) | CAATATATCTAACTCATTGAATCTTTATTAGTTTTGTTTTTCACG |
| | CTTGTTACCACTATTAGTGTGATAGGAACAGCCAGAATAGCGGA |
| | ACACATAGCCGGTGCTATACTTAATCTCGTTAATTACTGGGACA |
| | TAACATCAAGAGGATATGAAATTCGAATTCATTAAAGAGGAGA |
| | AAGGTACC |
| ahpC | GCTTAGATCAGGTGATTGCCCTTTGTTTATGAGGGTGTTGTAATC |
| (SEQ ID NO: 582) | CATGTCGTTGTTGCATTTGTAAGGGCAACACCTCAGCCTGCAGG |
| | CAGGCACTGAAGATACCAAAGGGTAGTTCAGATTACACGGTCA |
| | CCTGGAAAGGGGGCCATTTTACTTTTTATCGCCGCTGGCGGTGC |
| | AAAGTTCACAAAGTTGTCTTACGAAGGTTGTAAGGTAAAACTTA |
| | TCGATTTGATAATGGAAACGCATTAGCCGAATCGGCAAAAATTG |
| | GTTACCTTACATCTCATCGAAAACACGGAGGAAGTATAGATGCG |
| | AATTCATTAAAGAGGAGAAAGGTACC |
| oxyS | CTCGAGTTCATTATCCATCCTCCATCGCCACGATAGTTCATGGCG |
| (SEQ ID NO: 583) | ATAGGTAGAATAGCAATGAACGATTATCCCTATCAAGCATTCTG |
| | ACTGATAATTGCTCACACGAATTCATTAAAGAGGAGAAAGGTA |
| | CC |

[0803] In some embodiments, the regulatory region sequence is at least about 80%, at least about 85%, at least about 90%, at least about 95%, or at least about 99% homologous to the sequence of SEQ ID NO: 580, SEQ ID NO: 581, SEQ ID NO: 582, and/or SEQ ID NO: 583.

[0804] In some embodiments, the genetically engineered bacteria of the invention comprise a gene encoding a ROS-sensing transcription factor, e.g., the oxyR gene, that is controlled by its native promoter, an inducible promoter, a promoter that is stronger than the native promoter, e.g., the GlnRS promoter or the P(Bla) promoter, or a constitutive promoter. In some instances, it may be advantageous to express the ROS-sensing transcription factor under the control of an inducible promoter in order to enhance expression stability. In some embodiments, expression of the ROS-sensing transcription factor is controlled by a different promoter than the promoter that controls expression of the therapeutic molecule. In some embodiments, expression of the ROS-sensing transcription factor is controlled by the same promoter that controls expression of the therapeutic molecule. In some embodiments, the ROS-sensing transcription factor and therapeutic molecule are divergently transcribed from a promoter region.

[0805] In some embodiments, the genetically engineered bacteria of the invention comprise a gene for a ROS-sensing transcription factor from a different species, strain, or substrain of bacteria. In some embodiments, the genetically engineered bacteria comprise a ROS-responsive regulatory region from a different species, strain, or substrain of bacteria. In some embodiments, the genetically engineered bacteria comprise a ROS-sensing transcription factor and corresponding ROS-responsive regulatory region from a different species, strain, or substrain of bacteria. The heterologous ROS-sensing transcription factor and regulatory region may increase the transcription of genes operatively linked to said regulatory region in the presence of ROS, as compared to the native transcription factor and regulatory region from bacteria of the same subtype under the same conditions.

[0806] In some embodiments, the genetically engineered bacteria comprise a ROS-sensing transcription factor, OxyR, and corresponding regulatory region, oxyS, from Escherichia coli. In some embodiments, the native ROS-sensing transcription factor, e.g., OxyR, is left intact and retains wild-type activity. In alternate embodiments, the native ROS-sensing transcription factor, e.g., OxyR, is deleted or mutated to reduce or eliminate wild-type activity.

[0807] In some embodiments, the genetically engineered bacteria of the invention comprise multiple copies of the endogenous gene encoding the ROS-sensing transcription factor, e.g., the oxyR gene. In some embodiments, the gene encoding the ROS-sensing transcription factor is present on a plasmid. In some embodiments, the gene encoding the ROS-sensing transcription factor and the gene or gene cassette for producing the therapeutic molecule are present on different plasmids. In some embodiments, the gene encoding the ROS-sensing transcription factor and the gene or gene cassette for producing the therapeutic molecule are present on the same. In some embodiments, the gene encoding the ROS-sensing transcription factor is present on a chromosome. In some embodiments, the gene encoding the ROS-sensing transcription factor and the gene or gene cassette for producing the therapeutic molecule are present on different chromosomes. In some embodiments, the gene encoding the ROS-sensing transcription factor and the gene or gene cassette for producing the therapeutic molecule are present on the same chromosome.

[0808] In some embodiments, the genetically engineered bacteria comprise a wild-type gene encoding a ROS-sensing transcription factor, e.g., the soxR gene, and a corresponding regulatory region, e.g., a soxS regulatory region, that is mutated relative to the wild-type regulatory region from bacteria of the same subtype. The mutated regulatory region increases the expression of the payload in the presence of ROS, as compared to the wild-type regulatory region under the same conditions. In some embodiments, the genetically engineered bacteria comprise a wild-type ROS-responsive regulatory region, e.g., the oxyS regulatory region, and a corresponding transcription factor, e.g., OxyR, that is mutated relative to the wild-type transcription factor from bacteria of the same subtype. The mutant transcription factor increases the expression of the payload in the presence of ROS, as compared to the wild-type transcription factor under the same conditions. In some embodiments, both the ROS-sensing transcription factor and corresponding regulatory region are mutated relative to the wild-type sequences from bacteria of the same subtype in order to increase expression of the payload in the presence of ROS.

[0809] In some embodiments, the gene or gene cassette for producing the payload is present on a plasmid and operably linked to a promoter that is induced by ROS. In some embodiments, the gene or gene cassette for producing the payload is present in the chromosome and operably linked to a promoter that is induced by ROS. In some embodiments, the gene or gene cassette for producing the payload is present on a chromosome and operably linked to a promoter that is induced by exposure to tetracycline. In some embodiments, the gene or gene cassette for producing the payload is present on a plasmid and operably linked to a promoter that is induced by exposure to tetracycline. In some embodiments, expression is further optimized by methods known in the art, e.g., by optimizing ribosomal binding sites, manipulating transcriptional regulators, and/or increasing mRNA stability.

[0810] In some embodiments, the genetically engineered bacteria may comprise multiple copies of the gene(s) capable of producing a payload(s). In some embodiments, the gene(s) capable of producing a payload(s) is present on a plasmid and operatively linked to a ROS-responsive regulatory region. In some embodiments, the gene(s) capable of producing a payload is present in a chromosome and operatively linked to a ROS-responsive regulatory region.

[0811] Thus, in some embodiments, the genetically engineered bacteria or genetically engineered virus produce one or more payloads under the control of an oxygen level-dependent promoter, a reactive oxygen species (ROS)-dependent promoter, or a reactive nitrogen species (RNS)-dependent promoter, and a corresponding transcription factor.

[0812] In some embodiments, the genetically engineered bacteria comprise a stably maintained plasmid or chromosome carrying a gene for producing a payload, such that the payload can be expressed in the host cell, and the host cell is capable of survival and/or growth in vitro, e.g., in medium, and/or in vivo. In some embodiments, a bacterium may comprise multiple copies of the gene encoding the payload. In some embodiments, the gene encoding the payload is expressed on a low-copy plasmid. In some embodiments, the low-copy plasmid may be useful for increasing stability of expression. In some embodiments, the low-copy plasmid may be useful for decreasing leaky expression under non-inducing conditions. In some embodiments, the gene encoding the payload is expressed on a high-copy plasmid. In some embodiments, the high-copy plasmid may be useful for increasing expression of the payload. In some embodiments, the gene encoding the payload is expressed on a chromosome.

[0813] Propionate and Other Promoters

[0814] In some embodiments, the genetically engineered bacteria comprise the gene or gene cassette for producing an anti-inflammation and/or gut barrier function enhancer molecule(s) expressed under the control of an inducible promoter that is responsive to specific molecules or metabolites in the environment, e.g., the tumor microenvironment, a specific tissue, or the mammalian gut. For example, the short-chain fatty acid propionate is a major microbial fermentation metabolite localized to the gut (Hosseini et al., 2011). In one embodiment, the gene or gene cassette for producing an anti-inflammation and/or gut barrier function enhancer molecule(s) is under the control of a propionate-inducible promoter. In a more specific embodiment, the gene or gene cassette for producing the anti-inflammation and/or gut barrier function enhancer molecule(s) is under the control of a propionate-inducible promoter that is activated by the presence of propionate in the mammalian gut. Any molecule or metabolite found in the mammalian gut, in a healthy and/or disease state, may be used to induce payload expression. Non-limiting examples of inducers include propionate, bilirubin, aspartate aminotransferase, alanine aminotransferase, blood coagulation factors II, VII, IX, and X, alkaline phosphatase, gamma glutamyl transferase, hepatitis antigens and antibodies, alpha fetoprotein, anti-mitochondrial, smooth muscle, and anti-nuclear antibodies, iron, transferrin, ferritin, copper, ceruloplasmin, ammonia, and manganese. In alternate embodiments, the gene or gene cassette for producing an anti-inflammation and/or gut barrier function enhancer molecule(s) is under the control of a pBAD promoter, which is activated in the presence of the sugar arabinose.

[0815] In some embodiments, the gene or gene cassette for producing the anti-inflammation and/or gut barrier function enhancer molecule(s) is present on a plasmid and operably linked to a promoter that is induced under low-oxygen or anaerobic conditions. In some embodiments, the gene or gene cassette for producing the anti-inflammation and/or gut barrier function enhancer molecule(s) is present in the chromosome and operably linked to a promoter that is induced under low-oxygen or anaerobic conditions. In some embodiments, the gene or gene cassette for producing the anti-inflammation and/or gut barrier function enhancer molecule(s) is present on a plasmid and operably linked to a promoter that is induced by molecules or metabolites that are specific to the mammalian gut. In some embodiments, the gene or gene cassette for producing the anti-inflammation and/or gut barrier function enhancer molecule(s) is present on a chromosome and operably linked to a promoter that is induced by molecules or metabolites that are specific to the tumor and/or the mammalian gut. In some embodiments, the gene or gene cassette for producing the anti-inflammation and/or gut barrier function enhancer molecule(s) is present on a chromosome and operably linked to a promoter that is induced by exposure to tetracycline. In some embodiments, the gene or gene cassette for producing the anti-inflammation and/or gut barrier function enhancer molecule(s) is present on a plasmid and operably linked to a promoter that is induced by exposure to tetracycline. In some embodiments, expression is further optimized by methods known in the art, e.g., by optimizing ribosomal binding sites, manipulating transcriptional regulators, and/or increasing mRNA stability.

[0816] In some embodiments, the genetically engineered bacteria comprise a stably maintained plasmid or chromosome carrying the gene or gene cassette for producing the anti-inflammation and/or gut barrier function enhancer molecule(s), such that the gene or gene cassette can be expressed in the host cell, and the host cell is capable of survival and/or growth in vitro, e.g., in medium, and/or in vivo, e.g., in the gut. In some embodiments, a bacterium may comprise multiple copies of the gene or gene cassette for producing the anti-inflammation and/or gut barrier function enhancer molecule(s). In some embodiments, gene or gene cassette for producing the payload is expressed on a low-copy plasmid. In some embodiments, the low-copy plasmid may be useful for increasing stability of expression. In some embodiments, the low-copy plasmid may be useful for decreasing leaky expression under non-inducing conditions. In some embodiments, gene or gene cassette for producing the anti-inflammation and/or gut barrier function enhancer molecule(s) is expressed on a high-copy plasmid. In some embodiments, the high-copy plasmid may be useful for increasing gene or gene cassette expression. In some embodiments, gene or gene cassette for producing the anti-inflammation and/or gut barrier function enhancer molecule(s) is expressed on a chromosome.

[0817] Table 26 lists a propionate promoter sequence. In some embodiments, the propionate promoter is induced in the mammalian gut. In some embodiments, the propionate promoter sequence is at least about 80%, at least about 85%, at least about 90%, at least about 95%, or at least about 99% homologous to the sequence of SEQ ID NO: 584.

TABLE 26
Propionate promoter sequence

| Description | Sequence |
|---|---|
| Prp (Propionate) | TTACCCGTCTGGATTTTCAGTACGCGCTTTTAAACGACGCCA |
| promoter Bold: prpR | CAGCGTGGTACGGCTGATCCCCAAATAACGTGCGGCGGCGCG |
| | CTTATCGCCATTAAAGCGTGCGAGCACCTCCTGCAATGGAAG |
| | CGCTTCTGCTGACGAGGGCGTGATTTCTGCTGTGGTCCCCAC |
| Lower case: | CAGTTCAGGTAATAATTGCCGCATAAATTGTCTGTCCAGTGT |
| ribosome binding | TGGTGCGGGATCGACGCTTAAAAAAAGCGCCAGGCGTTCCAT |
| site ATG underlined: | CATATTCCGCAGTTCGCGAATATTACCGGGCCAATGATAGTT |
| start of gene of | CAGTAGAAGCGGCTGACACTGCGTCAGCCCATGACGCACCGA |
| interest SEQ ID NO: 584 | TTCGGTAAAAGGGATCTCCATCGCGGCCAGCGATTGTTTTAA |
| | AAAGTTTTCCGCCAGAGGCAGAATATCAGGCTGTCGCTCGCG |
| | CAAGGGGGGAAGCGGCAGACGCAGAATGCTCAAACGGTAAAA |
| | CAGATCGGTACGAAAACGTCCTTGCGTTATCTCCCGATCCAG |
| | ATCGCAATGCGTGGCGCTGATCACCCGGACATCTACCGGGAT |
| | CGGCTGATGCCCGCCAACGCGGGTGACGGCTTTTTCCTCCAG |
| | TACGCGTAGAAGGCGGGTTTGTAACGGCAGCGGCATTTCGCC |
| | AATTTCGTCAAGAAACAGCGTGCCGCCGTGGGCGACCTCAAA |
| | CAGCCCCGCACGTCCACCTCGTCTTGAGCCGGTAAACGCTCC |
| | CTCCTCATAGCCAAACAGTTCAGCCTCCAGCAACGACTCGGT |
| | AATCGCGCCGCAATTAACGGCGACAAAGGGCGGAGAAGGCTT |
| | GTTCTGACGGTGGGGCTGACGGTTAAACAACGCCTGATGAAT |
| | CGCTTGCGCCGCCAGCTCTTTCCCGGTCCCTGTTTCCCCCTG |
| | AATCAGCACTGCCGCGCGGGAACGGGCATAGAGTGTAATCGT |
| | ATGGCGAACCTGCTCCATTTGTGGTGAATCGCCGAGGATATC |
| | GCTCAGCGCATAACGGGTCTGTAATCCCTTGCTGGAGGTATG |
| | CTGGCTATACTGACGCCGTGTCAGGCGGGTCATATCCAGCGC |
| | ATCATGGAAAGCCTGACGTACGGTGGCCGCTGAATAAATAAA |
| | GATGGCGGTCATTCCTGCCTCTTCCGCCAGGTCGGTAATTAG |
| | TCCTGCCCCAATTACAGCCTCAATGCCGTTAGCTTTGAGCTC |
| | GTTAATTTGCCCGCGAGCATCCTCTTCAGTGATATAGCTTCG |
| | CTGTTCAAGACGGAGGTGAAACGTTTTCTGAAAGGCGACCAG |
| | AGCCGGAATGGTCTCCTGATAGGTCACGATTCCCATTGAGGA |
| | AGTCAGCTTTCCCGCTTTTGCCAGAGCCTGTAATACATCGAA |
| | TCCGCTGGGTTTGATGAGGATGACAGGTACCGACAGTCGGCT |
| | TTTTAAATAAGCGCCGTTGGAACCTGCCGCGATAATCGCGTC |
| | GCAGCGTTCGGTTGCCAGTTTTTTGCGAATGTAGGCTACTGC |
| | CTTTTCAAAACCGAGCTGAATAGGCGTGATCGTCGCCAGATG |
| | ATCAAACTCCAGGCTGATATCCCGAAATAGTTCGAACAGGCG |
| | CGTTACCGAGACCGTCCAGATCACCGGTTTATCGCTATTATC |
| | GCGCGAAGCGCTATGCACAGTAACCATCGTCGTAGATTCATG |
| | TTTAAGGAACGAATTCTTGTTTTATAGATGTTTCGTTAATGT |
| | TGCAATGAAACACAGGCCTCCGTTTCATGAAACGTTAGCTGA |
| | CTCGTTTTTCTTGTGACTCGTCTGTCAGTATTAAAAAAGATT |
| | TTTCATTTAACTGATTGTTTTTAAATTGAATTTTATTTAATG |
| | GTTTCTCGGTTTTTGGGTCTGGCATATCCCTTGCTTTAATGA |
| | GTGCATCTTAATTAACAATTCAATAACAAGAGGGCTGAATag |
| | taatttcaacaaaataacgagcattcgaatg |

[0818] Other Inducible Promoters

[0819] In some embodiments, the gene encoding the anti-inflammation and/or gut barrier function enhancer molecule(s) is present on a plasmid and operably linked to a promoter that is induced by one or more nutritional and/or chemical inducer(s) and/or metabolite(s). In some embodiments, the gene encoding the anti-inflammation and/or gut barrier function enhancer molecule(s) is present in the chromosome and operably linked to a promoter that is induced by one or more nutritional and/or chemical inducer(s) and/or metabolite(s).

[0820] In some embodiments, the bacterial cell comprises a stably maintained plasmid or chromosome carrying the one or more gene sequences(s), inducible by one or more nutritional and/or chemical inducer(s) and/or metabolite(s), encoding the anti-inflammation and/or gut barrier function enhancer molecule(s), such that the anti-inflammation and/or gut barrier function enhancer molecule(s) can be expressed in the host cell, and the host cell is capable of survival and/or growth in vitro, e.g., in medium, and/or in vivo, e.g., in the gut. In some embodiments, bacterial cell comprises two or more distinct copies of the one or more gene sequences(s) encoding the anti-inflammation and/or gut barrier function enhancer molecule(s), which is controlled by a promoter inducible one or more nutritional and/or chemical inducer(s) and/or metabolite(s). In some embodiments, the genetically engineered bacteria comprise multiple copies of the same one or more gene sequences(s) encoding the anti-inflammation and/or gut barrier function enhancer molecule(s), which is controlled by a promoter inducible one or more nutritional and/or chemical inducer(s) and/or metabolite(s). In some embodiments, the one or more gene sequences(s) encoding the anti-inflammation and/or gut barrier function enhancer molecule(s), is present on a plasmid and operably linked to a directly or indirectly inducible promoter inducible by one or more nutritional and/or chemical inducer(s) and/or metabolite(s). In some embodiments, the one or more gene sequences(s) encoding the anti-inflammation and/or gut barrier function enhancer molecule(s), is present on a chromosome and operably linked to a directly or indirectly inducible by one or more nutritional and/or chemical inducer(s) and/or metabolite(s).

[0821] In some embodiments, one or more gene sequence(s) encoding polypeptides of interest described herein is present on a plasmid and operably linked to promoter a directly or indirectly inducible by one or more nutritional and/or chemical inducer(s) and/or metabolite(s). In some embodiments, the bacterial cell comprises a stably maintained plasmid or chromosome carrying the gene encoding the anti-inflammation and/or gut barrier function enhancer molecule(s), which is induced by one or more nutritional and/or chemical inducer(s) and/or metabolite(s), such that the anti-inflammation and/or gut barrier function enhancer molecule(s) can be expressed in the host cell, and the host cell is capable of survival and/or growth in vitro, e.g., under culture conditions, and/or in vivo, e.g., in the gut and/or the tumor microenvironment. In some embodiments, bacterial cell comprises two or more gene sequence(s) for the production of a polypeptide of interest, one or more of which are induced by one or more nutritional and/or chemical inducer(s) and/or metabolite(s). In some embodiments, the genetically engineered bacteria comprise multiple copies of the same gene sequence(s) for the production of a polypeptide of interest which are induced by one or more nutritional and/or chemical inducer(s) and/or metabolite(s). In some embodiments, the genetically engineered bacteria comprise multiple copies of different gene sequence(s) for the production of a polypeptide of interest, one or more of which are induced by one or more nutritional and/or chemical inducer(s) and/or metabolite(s).

[0822] In some embodiments, the gene sequence(s) for the production of a polypeptide of interest is present on a plasmid and operably linked to a promoter that is induced by one or more nutritional and/or chemical inducer(s) and/or metabolite(s). In some embodiments, gene sequence(s) for the production of a polypeptide of interest is present in the chromosome and operably linked to a promoter that is induced by one or more nutritional and/or chemical inducer(s) and/or metabolite(s).

[0823] In some embodiments, the promoter that is operably linked to the gene encoding the polypeptide of interest is directly or indirectly induced by one or more nutritional and/or chemical inducer(s) and/or metabolite(s).

[0824] In some embodiments, one or more inducible promoter(s) are useful for or induced during in vivo expression of the one or more protein(s) of interest. In some embodiments, the promoters are induced during in vivo expression of one or more anti-inflammation and/or gut barrier function enhancer molecule(s) and/or other polypeptide(s) of interest. In some embodiments, expression of one or more anti-inflammation and/or gut barrier function enhancer molecule(s) and/or other polypeptide(s) of interest is driven directly or indirectly by one or more arabinose inducible promoter(s) in vivo. In some embodiments, the promoter is directly or indirectly induced by a chemical and/or nutritional inducer and/or metabolite which is co-administered with the genetically engineered bacteria of the invention.

[0825] In some embodiments, expression of one or more anti-inflammation and/or gut barrier function enhancer molecule(s) and/or other polypeptide(s) of interest, is driven directly or indirectly by one or more promoter(s) induced by a chemical and/or nutritional inducer and/or metabolite during in vitro growth, preparation, or manufacturing of the strain prior to in vivo administration. In some embodiments, the promoter(s) induced by a chemical and/or nutritional inducer and/or metabolite are induced in culture, e.g., grown in a flask, fermenter or other appropriate culture vessel, e.g., used during cell growth, cell expansion, fermentation, recovery, purification, formulation, and/or manufacture. In some embodiments, the promoter is directly or indirectly induced by a molecule that is added to in the bacterial culture to induce expression and pre-load the bacterium with the anti-inflammation and/or gut barrier function enhancer molecule(s) and/or other polypeptide(s) of interest prior to administration. In some embodiments, the cultures, which are induced by a chemical and/or nutritional inducer and/or metabolite, are grown aerobically. In some embodiments, the cultures, which are induced by a chemical and/or nutritional inducer and/or metabolite, are grown anaerobically.

[0826] The genes of arabinose metabolism are organized in one operon, AraBAD, which is controlled by the PAraBAD promoter. The PAraBAD (or Para) promoter suitably fulfills the criteria of inducible expression systems. PAraBAD displays tighter control of payload gene expression than many other systems, likely due to the dual regulatory role of AraC, which functions both as an inducer and as a repressor. Additionally, the level of ParaBAD-based expression can be modulated over a wide range of L-arabinose concentrations to fine-tune levels of expression of the payload. However, the cell population exposed to sub-saturating L-arabinose concentrations is divided into two subpopulations of induced and uninduced cells, which is determined by the differences between individual cells in the availability of L-arabinose transporter (Zhang et al., Development and Application of an Arabinose-Inducible Expression System by Facilitating Inducer Uptake in Corynebacterium glutamicum; Appl. Environ. Microbiol. August 2012 vol. 78 no. 16 5831-5838). Alternatively, inducible expression from the ParaBad can be controlled or fine-tuned through the optimization of the ribosome binding site (RBS), as described herein. An exemplary construct is depicted in the figures and examples.

[0827] In one embodiment, expression of one or more anti-inflammation and/or gut barrier function enhancer molecule(s) of interest, e.g., one or more therapeutic polypeptide(s), is driven directly or indirectly by one or more arabinose inducible promoter(s).

[0828] In some embodiments, the arabinose inducible promoter is useful for or induced during in vivo expression of the one or more protein(s) of interest. In some embodiments, expression of one or more anti-inflammation and/or gut barrier function enhancer molecule(s) of interest is driven directly or indirectly by one or more arabinose inducible promoter(s) in vivo. In some embodiments, the promoter is directly or indirectly induced by a molecule that is co-administered with the genetically engineered bacteria of the invention, e.g., arabinose.

[0829] In some embodiments, expression of one or more protein(s) of interest, is driven directly or indirectly by one or more arabinose inducible promoter(s) during in vitro growth, preparation, or manufacturing of the strain prior to in vivo administration. In some embodiments, the arabinose inducible promoter(s) are induced in culture, e.g., grown in a flask, fermenter or other appropriate culture vessel, e.g., used during cell growth, cell expansion, fermentation, recovery, purification, formulation, and/or manufacture. In some embodiments, the promoter is directly or indirectly induced by a molecule that is added to in the bacterial culture to induce expression and pre-load the bacterium with the payload prior to administration, e.g., arabinose. In some embodiments, the cultures, which are induced by arabinose, are grown aerobically. In some embodiments, the cultures, which are induced by arabinose, are grown anaerobically.

[0830] In one embodiment, the arabinose inducible promoter drives the expression of a construct comprising one or more protein(s) of interest, jointly with a second promoter, e.g., a second constitutive or inducible promoter. In some embodiments, two promoters are positioned proximally to the construct and drive its expression, wherein the arabinose inducible promoter drives expression under a first set of exogenous conditions, and the second promoter drives the expression under a second set of exogenous conditions. In a non-limiting example, the first and second conditions may be two sequential culture conditions (i.e., during preparation of the culture in a flask, fermenter or other appropriate culture vessel, e.g., arabinose and IPTG). In another non-limiting example, the first inducing conditions may be culture conditions, e.g., including arabinose presence, and the second inducing conditions may be in vivo conditions. Such in vivo conditions include low-oxygen, microaerobic, or anaerobic conditions, presence of gut metabolites, and/or metabolites administered in combination with the bacterial strain. In some embodiments, the one or more arabinose promoters drive expression of one or more protein(s) of interest, in combination with the FNR promoter driving the expression of the same gene sequence(s).

[0831] In some embodiments, the arabinose inducible promoter drives the expression of one or more protein(s) of interest from a low-copy plasmid or a high copy plasmid or a biosafety system plasmid described herein. In some embodiments, the arabinose inducible promoter drives the expression of one or more protein(s) of interest from a construct which is integrated into the bacterial chromosome. Exemplary insertion sites are described herein.

[0832] In some embodiments, one or more protein(s) of interest are knocked into the arabinose operon and are driven by the native arabinose inducible promoter

[0833] In some embodiments, the genetically engineered bacteria comprise one or more gene sequence(s) having at least 80%, 81%, 82%, 83%, 84%, 85%, 86%, 87%, 88%, 89%, 90%, 91%, 92%, 93%, 94%, 95%, 96%, 97%, 98%, or 99% identity with any of the sequences of SEQ ID NO: 585. In some embodiments, the arabinose inducible construct further comprises a gene encoding AraC, which is divergently transcribed from the same promoter as the one or more one or more protein(s) of interest. In some embodiments, the genetically engineered bacteria comprise one or more gene sequence(s) having at least 80%, 81%, 82%, 83%, 84%, 85%, 86%, 87%, 88%, 89%, 90%, 91%, 92%, 93%, 94%, 95%, 96%, 97%, 98%, or 99% identity with any of the sequences of SEQ ID NO: 586. In some embodiments, the genetically engineered bacteria comprise one or more gene sequence(s) encoding a polypeptide having at least 80%, 81%, 82%, 83%, 84%, 85%, 86%, 87%, 88%, 89%, 90%, 91%, 92%, 93%, 94%, 95%, 96%, 97%, 98%, or 99% identity with the polypeptide encoded by any of the sequences of SEQ ID NO: 587.

[0834] In some embodiments, the genetically engineered bacteria comprise one or more gene sequence(s) which are inducible through a rhamnose inducible system. The genes rhaBAD are organized in one operon which is controlled by the rhaP BAD promoter. The rhaP BAD promoter is regulated by two activators, RhaS and RhaR, and the corresponding genes belong to one transcription unit which divergently transcribed in the opposite direction of rhaBAD. In the presence of L-rhamnose, RhaR binds to the rhaP RS promoter and activates the production of RhaR and RhaS. RhaS together with L-rhamnose then bind to the rhaP BAD and the rhaP T promoter and activate the transcription of the structural genes. In contrast to the arabinose system, in which AraC is provided and divergently transcribed in the gene sequence(s), it is not necessary to express the regulatory proteins in larger quantities in the rhamnose expression system because the amounts expressed from the chromosome are sufficient to activate transcription even on multi-copy plasmids. Therefore, only the rhaP BAD promoter is cloned upstream of the gene that is to be expressed. Full induction of rhaBAD transcription also requires binding of the CRP-cAMP complex, which is a key regulator of catabolite repression. Alternatively, inducible expression from the rhaBAD can be controlled or fine-tuned through the optimization of the ribosome binding site (RBS), as described herein.

[0835] In one embodiment, expression of one or more protein(s) of interest is driven directly or indirectly by one or more rhamnose inducible promoter(s). In one embodiment, expression of the payload is driven directly or indirectly by a rhamnose inducible promoter.

[0836] In some embodiments, the rhamnose inducible promoter is useful for or induced during in vivo expression of the one or more protein(s) of interest. In some embodiments, expression of one or more protein(s) of interest is driven directly or indirectly by one or more rhamnose inducible promoter(s) in vivo. In some embodiments, the promoter is directly or indirectly induced by a molecule that is co-administered with the genetically engineered bacteria of the invention, e.g., rhamnose

[0837] In some embodiments, expression of one or more protein(s) of interest, is driven directly or indirectly by one or more rhamnose inducible promoter(s) during in vitro growth, preparation, or manufacturing of the strain prior to in vivo administration. In some embodiments, the rhamnose inducible promoter(s) are induced in culture, e.g., grown in a flask, fermenter or other appropriate culture vessel, e.g., used during cell growth, cell expansion, fermentation, recovery, purification, formulation, and/or manufacture. In some embodiments, the promoter is directly or indirectly induced by a molecule that is added to in the bacterial culture to induce expression and pre-load the bacterium with the payload prior to administration, e.g., rhamnose. In some embodiments, the cultures, which are induced by rhamnose, are grown aerobically. In some embodiments, the cultures, which are induced by rhamnose, are grown anaerobically.

[0838] In one embodiment, the rhamnose inducible promoter drives the expression of a construct comprising one or more protein(s) of interest jointly with a second promoter, e.g., a second constitutive or inducible promoter. In some embodiments, two promoters are positioned proximally to the construct and drive its expression, wherein the rhamnose inducible promoter drives expression under a first set of exogenous conditions, and the second promoter drives the expression under a second set of exogenous conditions. In a non-limiting example, the first and second conditions may be two sequential culture conditions (i.e., during preparation of the culture in a flask, fermenter or other appropriate culture vessel, e.g., rhamnose and arabinose). In another non-limiting example, the first inducing conditions may be culture conditions, e.g., including rhamnose presence, and the second inducing conditions may be in vivo conditions. Such in vivo conditions include low-oxygen, microaerobic, or anaerobic conditions, presence of gut metabolites, and/or metabolites administered in combination with the bacterial strain. In some embodiments, the one or more rhamnose promoters drive expression of one or more protein(s) of interest and/or transcriptional regulator(s), e.g., FNRS24Y, in combination with the FNR promoter driving the expression of the same gene sequence(s).

[0839] In some embodiments, the rhamnose inducible promoter drives the expression of one or more protein(s) of interest, from a low-copy plasmid or a high copy plasmid or a biosafety system plasmid described herein. In some embodiments, the rhamnose inducible promoter drives the expression of one or more protein(s) of interest, from a construct which is integrated into the bacterial chromosome. Exemplary insertion sites are described herein.

[0840] In some embodiments, the genetically engineered bacteria comprise one or more gene sequence(s) having at least 80%, 81%, 82%, 83%, 84%, 85%, 86%, 87%, 88%, 89%, 90%, 91%, 92%, 93%, 94%, 95%, 96%, 97%, 98%, or 99% identity with any of the sequences of SEQ ID NO: 588.

[0841] In some embodiments, the genetically engineered bacteria comprise one or more gene sequence(s) which are inducible through an Isopropyl β-D-1-thiogalactopyranoside (IPTG) inducible system or other compound which induced transcription from the Lac Promoter. IPTG is a molecular mimic of allolactose, a lactose metabolite that activates transcription of the lac operon. In contrast to allolactose, the sulfur atom in IPTG creates a non-hydrolyzable chemical blond, which prevents the degradation of IPTG, allowing the concentration to remain constant. IPTG binds to the lac repressor and releases the tetrameric repressor (lacI) from the lac operator in an allosteric manner, thereby allowing the transcription of genes in the lac operon. Since IPTG is not metabolized by E. coli, its concentration stays constant and the rate of expression of Lac promoter-controlled is tightly controlled, both in vivo and in vitro. IPTG intake is independent on the action of lactose permease, since other transport pathways are also involved. Inducible expression from the PLac can be controlled or fine-tuned through the optimization of the ribosome binding site (RBS), as described herein. Other compounds which inactivate LacI, can be used instead of IPTG in a similar manner.

[0842] In one embodiment, expression of one or more protein(s) of interest is driven directly or indirectly by one or more IPTG inducible promoter(s).

[0843] In some embodiments, the IPTG inducible promoter is useful for or induced during in vivo expression of the one or more protein(s) of interest. In some embodiments, expression of one or more protein(s) of interest is driven directly or indirectly by one or more IPTG inducible promoter(s) in vivo. In some embodiments, the promoter is directly or indirectly induced by a molecule that is co-administered with the genetically engineered bacteria of the invention, e.g., IPTG.

[0844] In some embodiments, expression of one or more protein(s) of interest is driven directly or indirectly by one or more IPTG inducible promoter(s) during in vitro growth, preparation, or manufacturing of the strain prior to in vivo administration. In some embodiments, the IPTG inducible promoter(s) are induced in culture, e.g., grown in a flask, fermenter or other appropriate culture vessel, e.g., used during cell growth, cell expansion, fermentation, recovery, purification, formulation, and/or manufacture. In some embodiments, the promoter is directly or indirectly induced by a molecule that is added to in the bacterial culture to induce expression and pre-load the bacterium with the payload prior to administration, e.g., IPTG. In some embodiments, the cultures, which are induced by IPTG, are grown aerobically. In some embodiments, the cultures, which are induced by IPTG, are grown anaerobically.

[0845] In one embodiment, the IPTG inducible promoter drives the expression of a construct comprising one or more protein(s) of interest jointly with a second promoter, e.g., a second constitutive or inducible promoter. In some embodiments, two promoters are positioned proximally to the construct and drive its expression, wherein the IPTG inducible promoter drives expression under a first set of exogenous conditions, and the second promoter drives the expression under a second set of exogenous conditions. In a non-limiting example, the first and second conditions may be two sequential culture conditions (i.e., during preparation of the culture in a flask, fermenter or other appropriate culture vessel, e.g., arabinose and IPTG). In another non-limiting example, the first inducing conditions may be culture conditions, e.g., including IPTG presence, and the second inducing conditions may be in vivo conditions. Such in vivo conditions include low-oxygen, microaerobic, or anaerobic conditions, presence of gut metabolites, and/or metabolites administered in combination with the bacterial strain. In some embodiments, the one or more IPTG inducible promoters drive expression of one or more protein(s) of interest in combination with the FNR promoter driving the expression of the same gene sequence(s).

[0846] In some embodiments, the IPTG inducible promoter drives the expression of one or more protein(s) of interest from a low-copy plasmid or a high copy plasmid or a biosafety system plasmid described herein. In some embodiments, the IPTG inducible promoter drives the expression of one or more protein(s) of interest from a construct which is integrated into the bacterial chromosome. Exemplary insertion sites are described herein.

[0847] In some embodiments, the genetically engineered bacteria comprise one or more gene sequence(s) having at least 80%, 81%, 82%, 83%, 84%, 85%, 86%, 87%, 88%, 89%, 90%, 91%, 92%, 93%, 94%, 95%, 96%, 97%, 98%, or 99% identity with any of the sequences of SEQ ID NO: 589. In some embodiments, the IPTG inducible construct further comprises a gene encoding lacI, which is divergently transcribed from the same promoter as the one or more one or more protein(s) of interest. In some embodiments, the genetically engineered bacteria comprise one or more gene sequence(s) having at least 80%, 81%, 82%, 83%, 84%, 85%, 86%, 87%, 88%, 89%, 90%, 91%, 92%, 93%, 94%, 95%, 96%, 97%, 98%, or 99% identity with any of the sequences of SEQ ID NO: 590. In some embodiments, the genetically engineered bacteria comprise one or more gene sequence(s) encoding a polypeptide having at least 80%, 81%, 82%, 83%, 84%, 85%, 86%, 87%, 88%, 89%, 90%, 91%, 92%, 93%, 94%, 95%, 96%, 97%, 98%, or 99% identity with the polypeptide encoded by any of the sequences of SEQ ID NO: 591.

[0848] In some embodiments, the genetically engineered bacteria comprise one or more gene sequence(s) which are inducible through a tetracycline inducible system. The initial system Gossen and Bujard (Tight control of gene expression in mammalian cells by tetracycline-responsive promoters. Gossen M & Bujard H. PNAS, 1992 Jun. 15; 89(12):5547-51) developed is known as tetracycline off: in the presence of tetracycline, expression from a tet-inducible promoter is reduced. Tetracycline-controlled transactivator (tTA) was created by fusing tetR with the C-terminal domain of VP16 (virion protein 16) from herpes simplex virus. In the absence of tetracycline, the tetR portion of tTA will bind tetO sequences in the tet promoter, and the activation domain promotes expression. In the presence of tetracycline, tetracycline binds to tetR, precluding tTA from binding to the tetO sequences. Next, a reverse Tet repressor (rTetR), was developed which created a reliance on the presence of tetracycline for induction, rather than repression. The new transactivator rtTA (reverse tetracycline-controlled transactivator) was created by fusing rTetR with VP16. The tetracycline on system is also known as the rtTA-dependent system.

[0849] In one embodiment, expression of one or more protein(s) of interest is driven directly or indirectly by one or more tetracycline inducible promoter(s).

[0850] In some embodiments, the tetracycline inducible promoter is useful for or induced during in vivo expression of the one or more protein(s) of interest. In some embodiments, expression of one or more protein(s) of interest and/or transcriptional regulator(s), e.g., FNRS24Y, is driven directly or indirectly by one or more tetracycline inducible promoter(s) in vivo. In some embodiments, the promoter is directly or indirectly induced by a molecule that is co-administered with the genetically engineered bacteria of the invention, e.g., tetracycline

[0851] In some embodiments, expression of one or more protein(s) of interest is driven directly or indirectly by one or more tetracycline inducible promoter(s) during in vitro growth, preparation, or manufacturing of the strain prior to in vivo administration. In some embodiments, the tetracycline inducible promoter(s) are induced in culture, e.g., grown in a flask, fermenter or other appropriate culture vessel, e.g., used during cell growth, cell expansion, fermentation, recovery, purification, formulation, and/or manufacture. In some embodiments, the promoter is directly or indirectly induced by a molecule that is added to in the bacterial culture to induce expression and pre-load the bacterium with the payload prior to administration, e.g., tetracycline. In some embodiments, the cultures, which are induced by tetracycline, are grown arerobically. In some embodiments, the cultures, which are induced by tetracycline, are grown anaerobically.

[0852] In one embodiment, the tetracycline inducible promoter drives the expression of a construct comprising one or more protein(s) of interest jointly with a second promoter, e.g., a second constitutive or inducible promoter. In some embodiments, two promoters are positioned proximally to the construct and drive its expression, wherein the tetracycline inducible promoter drives expression under a first set of exogenous conditions, and the second promoter drives the expression under a second set of exogenous conditions. In a non-limiting example, the first and second conditions may be two sequential culture conditions (i.e., during preparation of the culture in a flask, fermenter or other appropriate culture vessel, e.g., tetracycline and IPTG). In another non-limiting example, the first inducing conditions may be culture conditions, e.g., including tetracycline presence, and the second inducing conditions may be in vivo conditions. Such in vivo conditions include low-oxygen, microaerobic, or anaerobic conditions, presence of gut metabolites, and/or metabolites administered in combination with the bacterial strain. In some embodiments, the one or more tetracycline promoters drive expression of one or more protein(s) of interest in combination with the FNR promoter driving the expression of the same gene sequence(s).

[0853] In some embodiments, the tetracycline inducible promoter drives the expression of one or more protein(s) of interest from a low-copy plasmid or a high copy plasmid or a biosafety system plasmid described herein. In some embodiments, the tetracycline inducible promoter drives the expression of one or more protein(s) of interest from a construct which is integrated into the bacterial chromosome. Exemplary insertion sites are described herein.

[0854] In some embodiments, the genetically engineered bacteria comprise one or more gene sequence(s) having at least 80%, 81%, 82%, 83%, 84%, 85%, 86%, 87%, 88%, 89%, 90%, 91%, 92%, 93%, 94%, 95%, 96%, 97%, 98%, or 99% identity with any of the bolded sequences of SEQ ID NO: 596 (tet promoter is in bold). In some embodiments, the tetracycline inducible construct further comprises a gene encoding AraC, which is divergently transcribed from the same promoter as the one or more one or more protein(s) of interest In some embodiments, the genetically engineered bacteria comprise one or more gene sequence(s) having at least 80%, 81%, 82%, 83%, 84%, 85%, 86%, 87%, 88%, 89%, 90%, 91%, 92%, 93%, 94%, 95%, 96%, 97%, 98%, or 99% identity with any of the sequences of SEQ ID NO: 596 in italics (Tet repressor is in italics). In some embodiments, the genetically engineered bacteria comprise one or more gene sequence(s) encoding a polypeptide having at least 80%, 81%, 82%, 83%, 84%, 85%, 86%, 87%, 88%, 89%, 90%, 91%, 92%, 93%, 94%, 95%, 96%, 97%, 98%, or 99% identity with the polypeptide encoded by any of the sequences of SEQ ID NO: 596 in italics (Tet repressor is in italics).

[0855] In some embodiments, the genetically engineered bacteria comprise one or more gene sequence(s) whose expression is controlled by a temperature sensitive mechanism. Thermoregulators are advantageous because of strong transcriptional control without the use of external chemicals or specialized media (see, e.g., Nemani et al., Magnetic nanoparticle hyperthermia induced cytosine deaminase expression in microencapsulated E. coli for enzyme-prodrug therapy; J Biotechnol. 2015 Jun. 10; 203: 32-40, and references therein). Thermoregulated protein expression using the mutant cI857 repressor and the pL and/or pR phage λ promoters have been used to engineer recombinant bacterial strains. The gene of interest cloned downstream of the λ promoters can then be efficiently regulated by the mutant thermolabile cI857 repressor of bacteriophage λ. At temperatures below 37° C., cI857 binds to the oL or oR regions of the pR promoter and blocks transcription by RNA polymerase. At higher temperatures, the functional cI857 dimer is destabilized, binding to the oL or oR DNA sequences is abrogated, and mRNA transcription is initiated. An exemplary construct is depicted in in the figures and examples. Inducible expression from the ParaBad can be controlled or further fine-tuned through the optimization of the ribosome binding site (RBS), as described herein.

[0856] In one embodiment, expression of one or more protein(s) of interest is driven directly or indirectly by one or more thermoregulated promoter(s).

[0857] In some embodiments, the thermoregulated promoter is useful for or induced during in vivo expression of the one or more protein(s) of interest. In some embodiments, expression of one or more protein(s) of interest is driven directly or indirectly by one or more thermoregulated promoter(s) in vivo. In some embodiments, the promoter is directly or indirectly induced by a molecule that is co-administered with the genetically engineered bacteria of the invention, e.g., temperature.

[0858] In some embodiments, expression of one or more protein(s) of interest is driven directly or indirectly by one or more thermoregulated promoter(s) during in vitro growth, preparation, or manufacturing of the strain prior to in vivo administration. In some embodiments, it may be advantageous to shup off production of the one or more protein(s) of interest. This can be done in a thermoregulated system by growing the strain at lower temperatures, e.g., 30 C. Expression can then be induced by elevating the temperature to 37 C and/or 42 C. In some embodiments, the thermoregulated promoter(s) are induced in culture, e.g., grown in a flask, fermenter or other appropriate culture vessel, e.g., used during cell growth, cell expansion, fermentation, recovery, purification, formulation, and/or manufacture. In some embodiments, the cultures, which are induced by temperatures between 37 C and 42 C, are grown arerobically. In some embodiments, the cultures, which are induced by induced by temperatures between 37 C and 42 C, are grown anaerobically.

[0859] In one embodiment, the thermoregulated promoter drives the expression of a construct comprising one or more protein(s) of interest jointly with a second promoter, e.g., a second constitutive or inducible promoter. In some embodiments, two promoters are positioned proximally to the construct and drive its expression, wherein the thermoregulated promoter drives expression under a first set of exogenous conditions, and the second promoter drives the expression under a second set of exogenous conditions. In a non-limiting example, the first and second conditions may be two sequential culture conditions (i.e., during preparation of the culture in a flask, fermenter or other appropriate culture vessel, e.g., thermoregulation and arabinose). In another non-limiting example, the first inducing conditions may be culture conditions, e.g., permissive temperature, and the second inducing conditions may be in vivo conditions. Such in vivo conditions include low-oxygen, microaerobic, or anaerobic conditions, presence of gut metabolites, and/or metabolites administered in combination with the bacterial strain. In some embodiments, the one or more thermoregulated promoters drive expression of one or more protein(s) of interest in combination with the FNR promoter driving the expression of the same gene sequence(s).

[0860] In some embodiments, the thermoregulated promoter drives the expression of one or more protein(s) of interest from a low-copy plasmid or a high copy plasmid or a biosafety system plasmid described herein. In some embodiments, the thermoregulated promoter drives the expression of one or more protein(s) of interest from a construct which is integrated into the bacterial chromosome. Exemplary insertion sites are described herein.

[0861] In some embodiments, the genetically engineered bacteria comprise one or more gene sequence(s) having at least 80%, 81%, 82%, 83%, 84%, 85%, 86%, 87%, 88%, 89%, 90%, 91%, 92%, 93%, 94%, 95%, 96%, 97%, 98%, or 99% identity with any of the sequences of SEQ ID NO: 592. In some embodiments, the thermoregulated construct further comprises a gene encoding mutant cI857 repressor, which is divergently transcribed from the same promoter as the one or more one or more protein(s) of interest. In some embodiments, the genetically engineered bacteria comprise one or more gene sequence(s) having at least 80%, 81%, 82%, 83%, 84%, 85%, 86%, 87%, 88%, 89%, 90%, 91%, 92%, 93%, 94%, 95%, 96%, 97%, 98%, or 99% identity with any of the sequences of SEQ ID NO: 593. In some embodiments, the genetically engineered bacteria comprise one or more gene sequence(s) encoding a polypeptide having at least 80%, 81%, 82%, 83%, 84%, 85%, 86%, 87%, 88%, 89%, 90%, 91%, 92%, 93%, 94%, 95%, 96%, 97%, 98%, or 99% identity with the polypeptide encoded by any of the sequences of SEQ ID NO: 595.

[0862] In some embodiments, the genetically engineered bacteria comprise one or more gene sequence(s) which are indirectly inducible through a system driven by the PssB promoter. The Pssb promoter is active under aerobic conditions, and shuts off under anaerobic conditions.

[0863] This promoter can be used to express a gene of interest under aerobic conditions. This promoter can also be used to tightly control the expression of a gene product such that it is only expressed under anaerobic conditions. In this case, the oxygen induced PssB promoter induces the expression of a repressor, which represses the expression of a gene of interest. As a result, the gene of interest is only expressed in the absence of the repressor, i.e., under anaerobic conditions. This strategy has the advantage of an additional level of control for improved fine-tuning and tighter control. FIG. 84A depicts a schematic of the gene organization of a PssB promoter.

[0864] In one embodiment, expression of one or more protein(s) of interest is indirectly regulated by a repressor expressed under the control of one or more PssB promoter(s).

[0865] In some embodiments, induction of the RssB promoter(s) indirectly drives the in vivo expression of one or more protein(s) of interest. In some embodiments, induction of the RssB promoter(s) indirectly drives the expression of one or more protein(s) of interest during in vitro growth, preparation, or manufacturing of the strain prior to in vivo administration. In some embodiments, conditions for induction of the RssB promoter(s) are provided in culture, e.g., in a flask, fermenter or other appropriate culture vessel, e.g., used during cell growth, cell expansion, fermentation, recovery, purification, formulation, and/or manufacture.

[0866] In some embodiments, the PssB promoter indirectly drives the expression of one or more protein(s) of interest from a low-copy plasmid or a high copy plasmid or a biosafety system plasmid described herein. In some embodiments, the PssB promoter indirectly drives the expression of one or more protein(s) of interest from a construct which is integrated into the bacterial chromosome. Exemplary insertion sites are described herein.

[0867] In another non-limiting example, this strategy can be used to control expression of thyA and/or dapA, e.g., to make a conditional auxotroph. The chromosomal copy of dapA or ThyA is knocked out. Under anaerobic conditions, dapA or thyA—as the case may be—are expressed, and the strain can grow in the absence of dap or thymidine. Under aerobic conditions, dapA or thyA expression is shut off, and the strain cannot grow in the absence of dap or thymidine. Such a strategy can, for example be employed to allow survival of bacteria under anaerobic conditions, e.g., the gut, but prevent survival under aerobic conditions (biosafety switch). In some embodiments, the genetically engineered bacteria comprise one or more gene sequence(s) having at least 80%, 81%, 82%, 83%, 84%, 85%, 86%, 87%, 88%, 89%, 90%, 91%, 92%, 93%, 94%, 95%, 96%, 97%, 98%, or 99% identity with any of the sequences of SEQ ID NO: 597.

[0868] Sequences useful for expression from inducible promoters are listed in Table 27.

TABLE 27
Inducible promoter construct sequences

| Description | Sequence |
|---|---|
| Arabinose | CAGACATTGCCGTCACTGCGTCTTTTACTGGCTCTTCTCGC |
| Promoter region | TAACCCAACCGGTAACCCCGCTTATTAAAAGCATTCTGTA |
| SEQ ID NO: | ACAAAGCGGGACCAAAGCCATGACAAAAACGCGTAACAA |
| 585 | AAGTGTCTATAATCACGGCAGAAAAGTCCACATTGATTAT |
| | TTGCACGGCGTCACACTTTGCTATGCCATAGCATTTTTATC |
| | CATAAGATTAGCGGATCCAGCCTGACGCTTTTTTTCGCAA |
| | CTCTCTACTGTTTCTCCATACCTCTAGAAATAATTTTGTTT |
| | AACTTTAAGAAGGAGATATACAT |
| AraC (reverse | TTATTCACAACCTGCCCTAAACTCGCTCGGACTCGCCCCG |
| orientation) | GTGCATTTTTTAAATACTCGCGAGAAATAGAGTTGATCGT |
| SEQ ID NO: | CAAAACCGACATTGCGACCGACGGTGGCGATAGGCATCC |
| 586 | GGGTGGTGCTCAAAAGCAGCTTCGCCTGACTGATGCGCTG |
| | GTCCTCGCGCCAGCTTAATACGCTAATCCCTAACTGCTGG |
| | CGGAACAAATGCGACAGACGCGACGGCGACAGGCAGACA |
| | TGCTGTGCGACGCTGGCGATATCAAAATTACTGTCTGCCA |
| | GGTGATCGCTGATGTACTGACAAGCCTCGCGTACCCGATT |
| | ATCCATCGGTGGATGGAGCGACTCGTTAATCGCTTCCATG |
| | CGCCGCAGTAACAATTGCTCAAGCAGATTTATCGCCAGCA |
| | ATTCCGAATAGCGCCCTTCCCCTTGTCCGGCATTAATGATT |
| | TGCCCAAACAGGTCGCTGAAATGCGGCTGGTGCGCTTCAT |
| | CCGGGCGAAAGAAACCGGTATTGGCAAATATCGACGGCC |
| | AGTTAAGCCATTCATGCCAGTAGGCGCGCGGACGAAAGT |
| | AAACCCACTGGTGATACCATTCGTGAGCCTCCGGATGACG |
| | ACCGTAGTGATGAATCTCTCCAGGCGGGAACAGCAAAAT |
| | ATCACCCGGTCGGCAGACAAATTCTCGTCCCTGATTTTTCA |
| | CCACCCCCTGACCGCGAATGGTGAGATTGAGAATATAACC |
| | TTTCATTCCCAGCGGTCGGTCGATAAAAAAATCGAGATAA |
| | CCGTTGGCCTCAATCGGCGTTAAACCCGCCACCAGATGGG |
| | CGTTAAACGAGTATCCCGGCAGCAGGGGATCATTTTGCGC |
| | TTCAGCCATACTTTTCATACTCCCGCCATTCAGAGAAGAA |
| | ACCAATTGTCCATATTGCAT |
| AraC | MQYGQLVSSLNGGSMKSMAEAQNDPLLPGYSFNAHLVAGL |
| polypeptide | TPIEANGYLDFFIDRPLGMKGYILNLTIRGQGVVKNQGREFV |
| SEQ ID NO: | CRPGDILLFPPGEIHHYGRHPEAHEWYHQWVYFRPRAYWHE |
| 587 | WLNWPSIFANTGFFRPDEAHQPHFSDLFGQIINAGQGEGRYS |
| | ELLAINLLEQLLLRRMEAINESLHPPMDNRVREACQYISDHL |
| | ADSNFDIASVAQHVCLSPSRLSHLFRQQLGISVLSWREDQRIS |
| | QAKLLLSTTRMPIATVGRNVGFDDQLYFSRVFKKCTGASPSE |
| | FRAGCE* |
| Region | CGGTGAGCATCACATCACCACAATTCAGCAAATTGTGAAC |
| comprising | ATCATCACGTTCATCTTTCCCTGGTTGCCAATGGCCCATTT |
| rhamnose | TCCTGTCAGTAACGAGAAGGTCGCGAATCAGGCGCTTTTT |
| inducible | AGACTGGTCGTAATGAAATTCAGCTGTCACCGGATGTGCT |
| promoter | TTCCGGTCTGATGAGTCCGTGAGGACGAAACAGCCTCTAC |
| SEQ ID NO: | AAATAATTTTGTTTAAAACAACACCCACTAAGATAACTCT |
| 588 | AGAAATAATTTTGTTTAACTTTAAGAAGGAGATATACAT |
| Lac Promoter | ATTCACCACCCTGAATTGACTCTCTTCCGGGCGCTATCATG |
| region | CCATACCGCGAAAGGTTTTGCGCCATTCGATGGCGCGCCG |
| SEQ ID NO: | CTTCGTCAGGCCACATAGCTTTCTTGTTCTGATCGGAACGA |
| 589 | TCGTTGGCTGTGTTGACAATTAATCATCGGCTCGTATAATG |
| | TGTGGAATTGTGAGCGCTCACAATTAGCTGTCACCGGATG |
| | TGCTTTCCGGTCTGATGAGTCCGTGAGGACGAAACAGCCT |
| | CTACAAATAATTTTGTTTAAAACAACACCCACTAAGATAA |
| | CTCTAGAAATAATTTTGTTTAACTTTAAGAAGGAGATATA |
| | CAT |
| LacO | GGAATTGTGAGCGCTCACAATT |
| LacI (in reverse | TCACTGCCCGCTTTCCAGTCGGGAAACCTGTCGTGCCAGC |
| orientation) | TGCATTAATGAATCGGCCAACGCGCGGGGAGAGGCGGTTT |
| SEQ ID NO: | GCGTATTGGGCGCCAGGGTGGTTTTTCTTTTCACCAGTGA |
| 590 | GACTGGCAACAGCTGATTGCCCTTCACCGCCTGGCCCTGA |
| | GAGAGTTGCAGCAAGCGGTCCACGCTGGTTTGCCCCAGCA |
| | GGCGAAAATCCTGTTTGATGGTGGTTAACGGCGGGATATA |
| | ACATGAGCTATCTTCGGTATCGTCGTATCCCACTACCGAG |
| | ATATCCGCACCAACGCGCAGCCCGGACTCGGTAATGGCGC |
| | GCATTGCGCCCAGCGCCATCTGATCGTTGGCAACCAGCAT |
| | CGCAGTGGGAACGATGCCCTCATTCAGCATTTGCATGGTT |
| | TGTTGAAAACCGGACATGGCACTCCAGTCGCCTTCCCGTT |
| | CCGCTATCGGCTGAATTTGATTGCGAGTGAGATATTTATG |
| | CCAGCCAGCCAGACGCAGACGCGCCGAGACAGAACTTAA |
| | TGGGCCCGCTAACAGCGCGATTTGCTGGTGACCCAATGCG |
| | ACCAGATGCTCCACGCCCAGTCGCGTACCGTCCTCATGGG |
| | AGAAAATAATACTGTTGATGGGTGTCTGGTCAGAGACATC |
| | AAGAAATAACGCCGGAACATTAGTGCAGGCAGCTTCCAC |
| | AGCAATGGCATCCTGGTCATCCAGCGGATAGTTAATGATC |
| | AGCCCACTGACGCGTTGCGCGAGAAGATTGTGCACCGCCG |
| | CTTTACAGGCTTCGACGCCGCTTCGTTCTACCATCGACACC |
| | ACCACGCTGGCACCCAGTTGATCGGCGCGAGATTTAATCG |
| | CCGCGACAATTTGCGACGGCGCGTGCAGGGCCAGACTGG |
| | AGGTGGCAACGCCAATCAGCAACGACTGTTTGCCCGCCAG |
| | TTGTTGTGCCACGCGGTTGGGAATGTAATTCAGCTCCGCC |
| | ATCGCCGCTTCCACTTTTTCCCGCGTTTTCGCAGAAACGTG |
| | GCTGGCCTGGTTCACCACGCGGGAAACGGTCTGATAAGAG |
| | ACACCGGCATACTCTGCGACATCGTATAACGTTACTGGTT |
| | TCAT |
| LacI | MKPVTLYDVAEYAGVSYQTVSRVVNQASHVSAKTREKVEA |
| polypeptide | AMAELNYIPNRVAQQLAGKQSLLIGVATSSLALHAPSQIVAA |
| sequence | IKSRADQLGASVVVSMVERSGVEACKAAVHNLLAQRVSGLI |
| SEQ ID NO: | INYPLDDQDAIAVEAACTNVPALFLDVSDQTPINSIIFSHEDGT |
| 591 | RLGVEHLVALGHQQIALLAGPLSSVSARLRLAGWHKYLTRN |
| | QIQPIAEREGDWSAMSGFQQTMQMLNEGIVPTAMLVANDQ |
| | MALGAMRAITESGLRVGADISVVGYDDTEDSSCYIPPLTTIK |
| | QDFRLLGQTSVDRLLQLSQGQAVKGNQLLPVSLVKRKTTLA |
| | PNTQTASPRALADSLMQLARQVSRLESGQ |
| Region | ACGTTAAATCTATCACCGCAAGGGATAAATATCTAACACC |
| comprising | GTGCGTGTTGACTATTTTACCTCTGGCGGTGATAATGGTTG |
| Temperature | CATAGCTGTCACCGGATGTGCTTTCCGGTCTGATGAGTCC |
| sensitive | GTGAGGACGAAACAGCCTCTACAAATAATTTTGTTTAAAA |
| promoter | CAACACCCACTAAGATAACTCTAGAAATAATTTTGTTTAA |
| SEQ ID NO: | CTTTAAGAAGGAGATATACAT |
| 592 | |
| mutant cI857 | TCAGCCAAACGTCTCTTCAGGCCACTGACTAGCGATAACT |
| repressor | TTCCCCACAACGGAACAACTCTCATTGCATGGGATCATTG |
| SEQ ID NO: | GGTACTGTGGGTTTAGTGGTTGTAAAAACACCTGACCGCT |
| 593 | ATCCCTGATCAGTTTCTTGAAGGTAAACTCATCACCCCCA |
| | AGTCTGGCTATGCAGAAATCACCTGGCTCAACAGCCTGCT |
| | CAGGGTCAACGAGAATTAACATTCCGTCAGGAAAGCTTGG |
| | CTTGGAGCCTGTTGGTGCGGTCATGGAATTACCTTCAACC |
| | TCAAGCCAGAATGCAGAATCACTGGCTTTTTTGGTTGTGC |
| | TTACCCATCTCTCCGCATCACCTTTGGTAAAGGTTCTAAGC |
| | TTAGGTGAGAACATCCCTGCCTGAACATGAGAAAAAACA |
| | GGGTACTCATACTCACTTCTAAGTGACGGCTGCATACTAA |
| | CCGCTTCATACATCTCGTAGATTTCTCTGGCGATTGAAGG |
| | GCTAAATTCTTCAACGCTAACTTTGAGAATTTTTGTAAGCA |
| | ATGCGGCGTTATAAGCATTTAATGCATTGATGCCATTAAA |
| | TAAAGCACCAACGCCTGACTGCCCCATCCCCATCTTGTCT |
| | GCGACAGATTCCTGGGATAAGCCAAGTTCATTTTTCTTTTT |
| | TTCATAAATTGCTTTAAGGCGACGTGCGTCCTCAAGCTGC |
| | TCTTGTGTTAATGGTTTCTTTTTTGTGCTCAT |
| RBS and leader | CTCTAGAAATAATTTTGTTTAACTTTAAGAAGGAGATATA |
| region | CAT |
| SEQ ID NO: | |
| 594 | |
| mutant cI857 | MSTKKKPLTQEQLEDARRLKAIYEKKKNELGLSQESVADKM |
| repressor | GMGQSGVGALFNGINALNAYNAALLTKILKVSVEEFSPSIAR |
| polypeptide | EIYEMYEAVSMQPSLRSEYEYPVFSHVQAGMFSPKLRTFTKG |
| sequence | DAERWVSTTKKASDSAFWLEVEGNSMTAPTGSKPSFPDGML |
| SEQ ID NO: | ILVDPEQAVEPGDFCIARLGGDEFTFKKLIRDSGQVFLQPLNP |
| 595 | QYPMIPCNESCSVVGKVIASQWPEETFG |
| TetR-Tet | Ttaagacccactttcacatttaagttgtttttctaatccgcatatgatcaattcaaggccgaataa |
| promoter | gaaggctggctctgcaccttggtgatcaaataattcgatagcttgtcgtaataatggcggcata |
| construct | ctatcagtagtaggtgtttccctttcttctttagcgacttgatgctcttgatcttccaatacgcaacct |
| SEQ ID NO: | aaagtaaaatgccccacagcgctgagtgcatataatgcattctctagtgaaaaaccttgttgg |
| 596 | cataaaaaggctaattgattttcgagagtttcatactttttctgtaggccgtgtacctaaatgta |
| | cttttgctccatcgcgatgacttagtaaagcacatctaaaacttttagcgttattacgtaaaaaat |
| | cttgccagctttccccttctaaagggcaaaagtgagtatggtgcctatctaacatctcaatggct |
| | aaggcgtcgagcaaagcccgcttattttttacatgccaatacaatgtaggctgctctacaccta |
| | gcttctgggcgagtttacgggttgttaaaccttcgattccgacctcattaagcagctctaatgcg |
| | atgttaatcactttacttttatctaatctagacatcattaattcctaatttttgttgacactctatcattg |
| | atagagttattttaccactccctatcagtgatagagaaaagtgaactctagaaataattttgttt |
| | aactttaagaaggagatatacat |
| PssB promoter | tcacctttcccggattaaacgcttttttgcccggtggcatggtgctaccggcgatcacaaacggtta |
| SEQ ID NO: | attatgacacaaattgacctgaatgaatatacagtattggaatgcattacccggagtgttgtgtaac |
| 597 | aatgtctggccaggtttgtttcccggaaccgaggtcacaacatagtaaaagcgctattggtaatgg |
| | tacaatcgcgcgtttacacttattc |

[0869] In some embodiments, the anti-inflammation and/or gut barrier enhancer molecule is butyrate. Methods of measuring butyrate levels, e.g., by mass spectrometry, gas chromatography, high-performance liquid chromatography (HPLC), are known in the art (see, e.g., Aboulnaga et al., 2013). In some embodiments, butyrate is measured as butyrate level/bacteria optical density (OD). In some embodiments, measuring the activity and/or expression of one or more gene products in the butyrogenic gene cassette serves as a proxy measurement for butyrate production. In some embodiments, the bacterial cells of the invention are harvested and lysed to measure butyrate production. In alternate embodiments, butyrate production is measured in the bacterial cell medium. In some embodiments, the genetically engineered bacteria produce at least about 1 nM/OD, at least about 10 nM/OD, at least about 100 nM/OD, at least about 500 nM/OD, at least about 1 μM/OD, at least about 10 μM/OD, at least about 100 μM/OD, at least about 500 μM/OD, at least about 1 mM/OD, at least about 2 mM/OD, at least about 3 mM/OD, at least about 5 mM/OD, at least about 10 mM/OD, at least about 20 mM/OD, at least about 30 mM/OD, or at least about 50 mM/OD of butyrate in the presence of ROS.

[0870] Constitutive Promoters

[0871] In some embodiments, the gene encoding the payload is present on a plasmid and operably linked to a constitutive promoter. In some embodiments, the gene encoding the payload is present on a chromosome and operably linked to a constitutive promoter.

[0872] In some embodiments, the constitutive promoter is active under in vivo conditions, e.g., the gut, as described herein. In some embodiments, the promoters is active under in vitro conditions, e.g., various cell culture and/or cell manufacturing conditions, as described herein. In some embodiments, the constitutive promoter is active under in vivo conditions, e.g., the gut, as described herein, and under in vitro conditions, e.g., various cell culture and/or cell production and/or manufacturing conditions, as described herein.

[0873] In some embodiments, the constitutive promoter that is operably linked to the gene encoding the payload is active in various exogenous environmental conditions (e.g., in vivo and/or in vitro and/or production/manufacturing conditions).

[0874] In some embodiments, the constitutive promoter is active in exogenous environmental conditions specific to the gut of a mammal. In some embodiments, the constitutive promoter is active in exogenous environmental conditions specific to the small intestine of a mammal. In some embodiments, the constitutive promoter is active in low-oxygen or anaerobic conditions such as the environment of the mammalian gut. In some embodiments, the constitutive promoter is active in the presence of molecules or metabolites that are specific to the gut of a mammal. In some embodiments, the constitutive promoter is directly or indirectly induced by a molecule that is co-administered with the bacterial cell. In some embodiments, the constitutive promoter is active in the presence of molecules or metabolites or other conditions, that are present during in vitro culture, cell production and/or manufacturing conditions.

[0875] Bacterial constitutive promoters are known in the art. Examplary constitutive promoters are listed in the following Tables.

TABLE 28A
Constitutive E. coli σ70 promoters

| Name | Description | Promoter Sequence | Length |
|---|---|---|---|
| BBa_I14018 | P(Bla) | . . . | 35 |
| SEQ ID NO: | | gtttatacataggcgagtactctgttatgg | |
| 598 | | | |
| BBa_I14033 | P(Cat) | . . . | 38 |
| SEQ ID NO: | | agaggttccaactttcaccataatgaaaca | |
| 599 | | | |
| BBa_I14034 | P(Kat) | . . . | 45 |
| SEQ ID NO: | | taaacaactaacggacaattctacctaaca | |
| 600 | | | |
| BBa_I732021 | Template for Building | . . . | 159 |
| SEQ ID NO: | Primer Family Member | acatcaagccaaattaaacaggattaacac | |
| 601 | | | |
| BBa_I742126 | Reverse lambda cI- | . . . | 49 |
| | regulated promoter | gaggtaaaatagtcaacacgcacggtgtta | |
| SEQ ID NO: | | | |
| 602 | | | |
| BBa_J01006 | Key Promoter absorbs 3 | . . . | 59 |
| SEQ ID NO: | | caggccggaataactccctataatgcgcca | |
| 603 | | | |
| BBa_J23100 | constitutive promoter | . . . | 35 |
| SEQ ID NO: | family member | ggctagctcagtcctaggtacagtgctagc | |
| 604 | | | |
| BBa_J23101 | constitutive promoter | . . . | 35 |
| SEQ ID NO: | family member | agctagctcagtcctaggtattatgctagc | |
| 605 | | | |
| BBa_J23102 | constitutive promoter | . . . | 35 |
| SEQ ID NO: | family member | agctagctcagtcctaggtactgtgctagc | |
| 606 | | | |
| BBa_J23103 | constitutive promoter | . . . | 35 |
| SEQ ID NO: | family member | agctagctcagtcctagggattatgctagc | |
| 607 | | | |
| BBa_J23104 | constitutive promoter | . . . | 35 |
| SEQ ID NO: | family member | agctagctcagtcctaggtattgtgctagc | |
| 608 | | | |
| BBa_J23105 | constitutive promoter | . . . | 35 |
| SEQ ID NO: | family member | ggctagctcagtectaggtactatgctagc | |
| 609 | | | |
| BBa_J23106 | constitutive promoter | . . . | 35 |
| SEQ ID NO: | family member | ggctagctcagtcctaggtactatgctagc | |
| 610 | | | |
| BBa_J23107 | constitutive promoter | . . . | 35 |
| SEQ ID NO: | family member | ggctagctcagccctaggtattatgctagc | |
| 611 | | | |
| BBa_J23108 | constitutive promoter | . . . | 35 |
| SEQ ID NO: | family member | agctagctcagtcctaggtataatgctagc | |
| 612 | | | |
| BBa_J23109 | constitutive promoter | . . . | 35 |
| SEQ ID NO: | family member | agctagctcagtcctagggactgtgctagc | |
| 613 | | | |
| BBa_J23110 | constitutive promoter | . . . | 35 |
| SEQ ID NO: | family member | ggctagctcagtcctaggtacaatgctagc | |
| 614 | | | |
| BBa_J23111 | constitutive promoter | . . . | 35 |
| SEQ ID NO: | family member | ggctagctcagtcctaggtatagtgctagc | |
| 615 | | | |
| BBa_J23112 | constitutive promoter | . . . | 35 |
| SEQ ID NO: | family member | agctagctcagtcctagggattatgctagc | |
| 616 | | | |
| BBa_J23113 | constitutive promoter | . . . | 35 |
| SEQ ID NO: | family member | ggctagctcagtcctagggattatgctagc | |
| 617 | | | |
| BBa_J23114 | constitutive promoter | . . . | 35 |
| SEQ ID NO: | family member | ggctagctcagtcctaggtacaatgctagc | |
| 618 | | | |
| BBa_J23115 | constitutive promoter | . . . | 35 |
| SEQ ID NO: | family member | agctagctcagcccttggtacaatgctagc | |
| 619 | | | |
| BBa_J23116 | constitutive promoter | . . . | 35 |
| SEQ ID NO: | family member | agctagctcagtcctagggactatgctagc | |
| 620 | | | |
| BBa_J23117 | constitutive promoter | . . . | 35 |
| SEQ ID NO: | family member | agctagctcagtcctagggattgtgctagc | |
| 621 | | | |
| BBa_J23118 | constitutive promoter | . . . | 35 |
| SEQ ID NO: | family member | ggctagctcagtcctaggtattgtgctagc | |
| 622 | | | |
| BBa_J23119 | constitutive promoter | . . . | 35 |
| SEQ ID NO: | family member | agctagctcagtcctaggtataatgctagc | |
| 623 | | | |
| BBa_J23150 | l bp mutant from J23107 | . . . | 35 |
| SEQ ID NO: | | ggctagctcagtcctaggtattatgctagc | |
| 624 | | | |
| BBa_J23151 | l bp mutant from J23114 | . . . | 35 |
| SEQ ID NO: | | ggctagctcagtcctaggtacaatgctagc | |
| 625 | | | |
| BBa_J44002 | pBAD reverse | . . . | 130 |
| SEQ ID NO: | | aaagtgtgacgccgtgcaaataatcaatgt | |
| 626 | | | |
| BBa_J48104 | NikR promoter, a protein | . . . | 40 |
| SEQ ID NO: | of the ribbon helix-helix | gacgaatacttaaaatcgtcatacttattt | |
| 627 | family of trancription | | |
| | factors that repress expre | | |
| BBa_J54200 | lacq_Promoter | . . . | 50 |
| SEQ ID NO: | | aaacctttcgcggtatggcatgatagcgcc | |
| 628 | | | |
| BBa_J56015 | lacIQ - promoter sequence | . . . | 57 |
| SEQ ID NO: | | tgatagcgcccggaagagagtcaattcagg | |
| 629 | | | |
| BBa_J64951 | E. coli CreABCD | . . . | 81 |
| SEQ ID NO: | phosphate sensing operon | ttatttaccgtgacgaactaattgctcgtg | |
| 630 | promoter | | |
| BBa_K088007 | GlnRS promoter | . . . | 38 |
| SEQ ID NO: | | catacgccgttatacgttgtttacgctttg | |
| 631 | | | |
| BBa_K119000 | Constitutive weak | . . . | 38 |
| SEQ ID NO: | promoter of lacZ | ttatgatccggctcgtatgttgtgtggac | |
| 632 | | | |
| BBa_K119001 | Mutated LacZ promoter | . . . | 38 |
| SEQ ID NO: | | ttatgcttccggctcgtatggtgtgtggac | |
| 633 | | | |
| BBa_K1330002 | Constitutive promoter | . . . | 35 |
| SEQ ID NO: | (J23105) | ggctagctcagtcctaggtactatgctagc | |
| 634 | | | |
| BBa_K137029 | constitutive promoter with | . . . | 39 |
| SEQ ID NO: | (TA)10 between -10 and - | atatatatatatatataatggaagcgtttt | |
| 635 | 35 elements | | |
| BBa_K137030 | constitutive promoter with | . . . | 37 |
| SEQ ID NO: | (TA)9 between -10 and - | atatatatatatatataatggaagcgtttt | |
| 636 | 35 elements | | |
| BBa_K137031 | constitutive promoter with | . . . | 62 |
| SEQ ID NO: | (C)10 between -10 and - | ccccgaaagcttaagaatataattgtaagc | |
| 637 | 35 elements | | |
| BBa_K137032 | constitutive promoter with | . . . | 64 |
| SEQ ID NO: | (C)12 between -10 and - | ccccgaaagcttaagaatataattgtaagc | |
| 638 | 35 elements | | |
| BBa_K137085 | optimized (TA) repeat | . . . | 31 |
| SEQ ID NO: | constitutive promoter with | tgacaatatatatatatatataatgctagc | |
| 639 | 13 bp between -10 and - | | |
| | 35 elements | | |
| BBa_K137086 | optimized (TA) repeat | . . . | 33 |
| SEQ ID NO: | constitutive promoter with | acaatatatatatatatatataatgctagc | |
| 640 | 15 bp between -10 and - | | |
| | 35 elements | | |
| BBa_K137087 | optimized (TA) repeat | . . . | 35 |
| SEQ ID NO: | constitutive promoter with | aatatatatatatatatatataatgctagc | |
| 641 | 17 bp between -10 and - | | |
| | 35 elements | | |
| BBa_K137088 | optimized (TA) repeat | . . . | 37 |
| SEQ ID NO: | constitutive promoter with | tatatatatatatatatatataatgctagc | |
| 642 | 19 bp between -10 and - | | |
| | 35 elements | | |
| BBa_K137089 | optimized (TA) repeat | . . . | 39 |
| SEQ ID NO: | constitutive promoter with | tatatatatatatatatatataatgctagc | |
| 643 | 21 bp between -10 and - | | |
| | 35 elements | | |
| BBa_K137090 | optimized (A) repeat | . . . | 35 |
| SEQ ID NO: | constitutive promoter with | aaaaaaaaaaaaaaaaaatataatgctagc | |
| 644 | 17 bp between -10 and - | | |
| | 35 elements | | |
| BBa_K137091 | optimized (A) repeat | . . . | 36 |
| SEQ ID NO: | constitutive promoter with | aaaaaaaaaaaaaaaaaatataatgctagc | |
| 645 | 18 bp between -10 and - | | |
| | 35 elements | | |
| BBa_K1585100 | Anderson Promoter with | . . . | 78 |
| SEQ ID NO: | lacI binding site | ggaattgtgagcggataacaatttcacaca | |
| 646 | | | |
| BBa_K1585101 | Anderson Promoter with | . . . | 78 |
| SEQ ID NO: | lacI binding site | ggaattgtgagcggataacaatttcacaca | |
| 647 | | | |
| BBa_K1585102 | Anderson Promoter with | . . . | 78 |
| SEQ ID NO: | lacI binding site | ggaattgtgagcggataacaatttcacaca | |
| 648 | | | |
| BBa_K1585103 | Anderson Promoter with | . . . | 78 |
| SEQ ID NO: | lacI binding site | ggaattgtgagcggataacaatttcacaca | |
| 649 | | | |
| BBa_K1585104 | Anderson Promoter with | . . . | 78 |
| SEQ ID NO: | lacI binding site | ggaattgtgagcggataacaatttcacaca | |
| 650 | | | |
| BBa_K1585105 | Anderson Promoter with | . . . | 78 |
| SEQ ID NO: | lacI binding site | ggaattgtgagcggataacaatttcacaca | |
| 651 | | | |
| BBa_K1585106 | Anderson Promoter with | . . . | 78 |
| SEQ ID NO: | lacI binding site | ggaattgtgagcggataacaatttcacaca | |
| 652 | | | |
| BBa_K1585110 | Anderson Promoter with | . . . | 78 |
| SEQ ID NO: | lacI binding site | ggaattgtgagcggataacaatttcacaca | |
| 653 | | | |
| BBa_K1585113 | Anderson Promoter with | . . . | 78 |
| SEQ ID NO: | lacI binding site | ggaattgtgagcggataacaatttcacaca | |
| 654 | | | |
| BBa_K1585115 | Anderson Promoter with | . . . | 78 |
| SEQ ID NO: | lacI binding site | ggaattgtgagcggataacaatttcacaca | |
| 655 | | | |
| BBa_K1585116 | Anderson Promoter with | . . . | 78 |
| SEQ ID NO: | lacI binding site | ggaattgtgagcggataacaatttcacaca | |
| 656 | | | |
| BBa_K1585117 | Anderson Promoter with | . . . | 78 |
| SEQ ID NO: | lacI binding site | ggaattgtgagcggataacaatttcacaca | |
| 657 | | | |
| BBa_K1585118 | Anderson Promoter with | . . . | 78 |
| SEQ ID NO: | lacI binding site | ggaattgtgagcggataacaatttcacaca | |
| 658 | | | |
| BBa_K1585119 | Anderson Promoter with | . . . | 78 |
| SEQ ID NO: | lacI binding site | ggaattgtgagcggataacaatttcacaca | |
| 659 | | | |
| BBa_K1824896 | J23100 + RBS | . . . | 88 |
| SEQ ID NO: | | gattaaagaggagaaatactagagtactag | |
| 660 | | | |
| BBa_K256002 | J23101:GFP | . . . | 918 |
| SEQ ID NO: | | caccttcgggtgggcctttctgcgtttata | |
| 661 | | | |
| BBa_K2560I8 | J23119:IFP | . . . | 1167 |
| SEQ ID NO: | | caccttcgggtgggcctttctgcgtttata | |
| 662 | | | |
| BBa_K256020 | J23119:HOI | . . . | 949 |
| SEQ ID NO: | | caccttcgggtgggcctttctgcgtttata | |
| 663 | | | |
| BBa_K256033 | Infrared signal reporter | . . . | 2124 |
| SEQ ID NO: | (J23119:IFP:J23119:HOI) | caccttcgggtgggcctttctgcgtttata | |
| 664 | | | |
| BBa_K292000 | Double terminator + | . . . | 138 |
| SEQ ID NO: | constitutive promoter | ggctagctcagtcctaggtacagtgctagc | |
| 665 | | | |
| BBa_K292001 | Double terminator + | . . . | 161 |
| SEQ ID NO: | Constitutive promoter + | tgctagctactagagattaaagaggagaaa | |
| 666 | Strong RBS | | |
| BBa_K418000 | IPTG inducible Lac | . . . | 1416 |
| SEQ ID NO: | promoter cassette | ttgtgagcggataacaagatactgagcaca | |
| 667 | | | |
| BBa_K418002 | IPTG inducible Lac | . . . | 1414 |
| SEQ ID NO: | promoter cassette | ttgtgagcggataacaagatactgagcaca | |
| 668 | | | |
| BBa_K418003 | IPTG inducible Lac | . . . | 1416 |
| SEQ ID NO: | promoter cassette | ttgtgagcggataacaagatactgagcaca | |
| 669 | | | |
| BBa_K823004 | Anderson promoter | . . . | 35 |
| SEQ ID NO: | J23100 | ggctagctcagtcctaggtacagtgctagc | |
| 670 | | | |
| BBa_K823005 | Anderson promoter | . . . | 35 |
| SEQ ID NO: | J23101 | agctagctcagtcctaggtattatgctagc | |
| 671 | | | |
| BBa_K823006 | Anderson promoter | . . . | 35 |
| SEQ ID NO: | J23102 | agctagctcagtcctaggtactgtgctagc | |
| 672 | | | |
| BBa_K823007 | Anderson promoter | . . . | 35 |
| SEQ ID NO: | J23103 | agctagctcagtcctagggattatgctagc | |
| 673 | | | |
| BBa_K823008 | Anderson promoter | . . . | 35 |
| SEQ ID NO: | J23106 | ggctagctcagtcctaggtatagtgctagc | |
| 674 | | | |
| BBa_K823010 | Anderson promoter | . . . | 35 |
| SEQ ID NO: | J23113 | ggctagctcagtcctagggattatgctagc | |
| 675 | | | |
| BBa_K823011 | Anderson promoter | . . . | 35 |
| SEQ ID NO: | J23114 | ggctagctcagtcctaggtacaatgctagc | |
| 676 | | | |
| BBa_K823013 | Anderson promoter | . . . | 35 |
| SEQ ID NO: | J23117 | agctagctcagtcctagggattgtgctagc | |
| 677 | | | |
| BBa_K823014 | Anderson promoter | . . . | 35 |
| SEQ ID NO: | J23118 | ggctagctcagtcctaggtattgtgctagc | |
| 678 | | | |
| BBa_M13101 | M13K07 gene I promoter | . . . | 47 |
| SEQ ID NO: | | cctgtttttatgttattctctctgtaaagg | |
| 679 | | | |
| BBa_M13102 | M13K07 gene II promoter | . . . | 48 |
| SEQ ID NO: | | aaatatttgcttatacaatcttcctgtttt | |
| 680 | | | |
| BBa_M13103 | M13K07 gene III | . . . | 48 |
| SEQ ID NO: | promoter | gctgataaaccgatacaattaaaggctcct | |
| 681 | | | |
| BBa_M13104 | M13K07 gene IV | . . . | 49 |
| SEQ ID NO: | promoter | ctcttctcagcgtcttaatctaagctatcg | |
| 682 | | | |
| BBa_M13105 | M13K07 gene V promoter | . . . | 50 |
| SEQ ID NO: | | atgagccagttcttaaaatcgcataaggta | |
| 683 | | | |
| BBa_M13106 | M13K07 gene VI | . . . | 49 |
| SEQ ID NO: | promoter | ctattgattgtgacaaaataaacttattcc | |
| 684 | | | |
| BBa_M13108 | M13K07 gene VIII | . . . | 47 |
| SEQ ID NO: | promoter | gtttcgcgcttggtataatcgctgggggtc | |
| 685 | | | |
| BBa_M13110 | M13110 | . . . | 48 |
| SEQ ID NO: | | ctttgcttctgactataatagtcagggtaa | |
| 686 | | | |
| BBa_M31519 | Modified promoter | . . . | 60 |
| SEQ ID NO: | sequence of g3. | aaaccgatacaattaaaggctcctgctagc | |
| 687 | | | |
| BBa_R1074 | Constitutive Promoter I | . . . | 74 |
| SEQ ID NO: | | caccacactgatagtgctagtgtagatcac | |
| 688 | | | |
| BBa_R1075 | Constitutive Promoter II | . . . | 49 |
| SEQ ID NO: | | gccggaataactccctataatgcgccacca | |
| 689 | | | |
| BBa_S03331 | --Specify Parts List-- | ttgacaagcttttcctcagctccgtaaact | |
| SEQ ID NO: | | | |
| 690 | | | |

TABLE 28B
Constitutive E. coli σ^{S} promoters

| Name | Description | Promoter Sequence | Length |
|---|---|---|---|
| BBa_J45992 | Full-length stationary phase | . . . | 199 |
| SEQ ID NO: | osmY promoter | ggtttcaaaattgtgatctatatttaacaa | |
| 691 | | | |
| BBa_J45993 | Minimal stationary phase | . . . | 57 |
| SEQ ID NO: | osmY promoter | ggtttcaaaattgtgatctatatttaacaa | |
| 692 | | | |

TABLE 28C
Constitutive E. coli σ³² promoters

| Name | Description | Promoter Sequence | Length |
|---|---|---|---|
| BBa_J45504 | htpG Heat Shock Promoter | . . . | 405 |
| SEQ ID NO: 693 | | tctattccaataaagaaatcttcctgcgtg | |
| BBa_K1895002 | dnaK Promoter | . . . | 182 |
| SEQ ID NO: 694 | | gaccgaatatatagtggaaacgtttagatg | |
| BBa_K1895003 | htpG Promoter | . . . | 287 |
| SEQ ID NO: 695 | | ccacatcctgtttttaaccttaaaatggca | |

TABLE 28D
Constitutive B. subtilis σ^{A} promoters

| Name | Description | Promoter Sequence | Length |
|---|---|---|---|
| BBa_K143012 | Promoter veg a constitutive | . . . | 97 |
| SEQ ID NO: 696 | promoter for B. subtilis | aaaaatgggctcgtgttgtacaataaatgt | |
| BBa_K143013 | Promoter 43 a constitutive | . . . | 56 |
| SEQ ID NO: 697 | promoter for B. subtilis | aaaaaaagcgcgcgattatgtaaaatataa | |
| BBa_K780003 | Strong constitutive promoter | . . . | 36 |
| SEQ ID NO: 698 | for Bacillus subtilis | aattgcagtaggcatgacaaaatggactca | |
| BBa_K823000 | P_{liaG} | . . . | 121 |
| SEQ ID NO: 699 | | caagcttttcctttataatagaatgaatga | |
| BBa_K823002 | P_{lepA} | . . . | 157 |
| SEQ ID NO: 700 | | tctaagctagtgtattttgcgtttaatagt | |
| BBa_K823003 | P_{veg} | . . . | 237 |
| SEQ ID NO: 701 | | aatgggctcgtgttgtacaataaatgtagt | |

TABLE 28E
Constitutive B. subtilis σ^{B} promoters

| Name | Description | Promoter Sequence | Length |
|---|---|---|---|
| BBa_K143010 | Promoter ctc for B. subtilis | . . . | 56 |
| SEQ ID NO: 702 | | atccttatcgttatgggtattgtttgtaat | |
| BBa_K143011 | Promoter gsiB for B. | . . . | 38 |
| SEQ ID NO: 703 | subtilis | taaaagaattgtgagcgggaatacaacaac | |
| BBa_K143013 | Promoter 43 a constitutive | . . . | 56 |
| SEQ ID NO: 704 | promoter for B. subtilis | aaaaaaagcgcgcgattatgtaaaatataa | |

TABLE 28F
Constitutive promoters from miscellaneous prokaryotes

| Name | Description | Promoter Sequence | Length |
|---|---|---|---|
| BBa_K112706 | Pspv2 from Salmonella | . . . | 474 |
| SEQ ID NO: 705 | | tacaaaataattcccctgcaaacattatca | |
| BBa_K112707 | Pspv from Salmonella | . . . | 1956 |
| SEQ ID NO: 706 | | tacaaaataattcccctgcaaacattatcg | |

TABLE 28G
Constitutive promoters from bacteriophage T7

| Name | Description | Promoter Sequence | Length |
|---|---|---|---|
| BBa_I712074 | T7 promoter (strong | . . . | 46 |
| SEQ ID NO: 707 | promoter from T7 | agggaatacaagctacttgttctttttgca | |
| | bacteriophage) | | |
| BBa_I719005 | T7 Promoter | taatacgactcactatagggaga | 23 |
| SEQ ID NO: 708 | | | |
| BBa_J34814 | T7 Promoter | gaatttaatacgactcactatagggaga | 28 |
| SEQ ID NO: 709 | | | |
| BBa_J64997 | T7 consensus -10 and | taatacgactcactatagg | 19 |
| SEQ ID NO: 710 | rest | | |
| BBa_K113010 | overlapping T7 | . . . | 40 |
| SEQ ID NO: 711 | promoter | gagtcgtattaatacgactcactatagggg | |
| BBa_K113011 | more overlapping T7 | . . . | 37 |
| SEQ ID NO: 712 | promoter | agtgagtcgtactacgactcactatagggg | |
| BBa_K113012 | weaken overlapping T7 | . . . | 40 |
| SEQ ID NO: 713 | promoter | gagtcgtattaatacgactctctatagggg | |
| BBa_K1614000 | T7 promoter for | taatacgactcactatag | 18 |
| SEQ ID NO: 714 | expression of functional | | |
| | RNA | | |
| BBa_R0085 | T7 Consensus Promoter | taatacgactcactatagggaga | 23 |
| SEQ ID NO: 715 | Sequence | | |
| BBa_R0180 | T7 RNAP promoter | ttatacgactcactatagggaga | 23 |
| SEQ ID NO: 716 | | | |
| BBa_R0181 | T7 RNAP promoter | gaatacgactcactatagggaga | 23 |
| SEQ ID NO: 717 | | | |
| BBa_R0182 | T7 RNAP promoter | taatacgtctcactatagggaga | 23 |
| SEQ ID NO: 718 | | | |
| BBa_R0183 | T7 RNAP promoter | tcatacgactcactatagggaga | 23 |
| SEQ ID NO: 719 | | | |
| BBa_Z0251 | T7 strong promoter | . . . | 35 |
| SEQ ID NO: 720 | | taatacgactcactatagggagaccacaac | |
| BBa_Z0252 | T7 weak binding and | . . . | 35 |
| SEQ ID NO: 721 | processivity | taattgaactcactaaagggagaccacagc | |
| BBa_Z0253 | T7 weak binding | . . . | 35 |
| SEQ ID NO: 722 | promoter | cgaagtaatacgactcactattagggaaga | |

TABLE 28H
Constitutive promoters from bacteriophage SP6

| Name | Description | Promoter Sequence | Length |
|---|---|---|---|
| BBa_J64998 | consensus -10 and rest from SP6 | atttaggtgacactataga | 19 |
| SEQ ID NO: 723 | | | |

TABLE 28I
Constitutive promoters from yeast

| Name | Description | Promoter Sequence | Length |
|---|---|---|---|
| BBa_I766555 | pCyc (Medium) Promoter | . . . | 244 |
| SEQ ID NO: 724 | | acaaacacaaatacacacactaaattaata | |
| BBa_I766556 | pAdh (Strong) Promoter | . . . | 1501 |
| SEQ ID NO: 725 | | ccaagcatacaatcaactatctcatataca | |
| BBa_I766557 | pSte5 (Weak) Promoter | . . . | 601 |
| SEQ ID NO: 726 | | gatacaggatacagcggaaacaacttttaa | |
| BBa_J63005 | yeast ADH1 promoter | . . . | 1445 |
| SEQ ID NO: 727 | | tttcaagctataccaagcatacaatcaact | |
| BBa_K105027 | cycl00 minimal promoter | . . . | 103 |
| SEQ ID NO: 728 | | cctttgcagcataaattactatacttctat | |
| BBa_K105028 | cyc70 minimal promoter | . . . | 103 |
| SEQ ID NO: 729 | | cctttgcagcataaattactatacttctat | |
| BBa_K105029 | cyc43 minimal promoter | . . . | 103 |
| SEQ ID NO: 730 | | cctttgcagcataaattactatacttctat | |
| BBa_K105030 | cyc28 minimal promoter | . . . | 103 |
| SEQ ID NO: 731 | | cctttgcagcataaattactatacttctat | |
| BBa_K105031 | cyc16 minimal promoter | . . . | 103 |
| SEQ ID NO: 732 | | cctttgcagcataaattactatacttctat | |
| BBa_K122000 | pPGK1 | . . . | 1497 |
| SEQ ID NO: 733 | | ttatctactttttacaacaaatataaaaca | |
| BBa_K124000 | pCYC Yeast Promoter | . . . | 288 |
| SEQ ID NO: 734 | | acaaacacaaatacacacactaaattaata | |
| BBa_K124002 | Yeast GPD (TDH3) | . . . | 681 |
| SEQ ID NO: 735 | Promoter | gtttcgaataaacacacataaacaaacaaa | |
| BBa_K319005 | yeast mid-length ADH1 | . . . | 720 |
| SEQ ID NO: 736 | promoter | ccaagcatacaatcaactatctcatataca | |
| BBa_M31201 | Yeast CLB1 promoter | . . . | 500 |
| SEQ ID NO: 737 | region, G2/M cell cycle | accatcaaaggaagctttaatcttctcata | |
| | specific | | |

TABLE 28J
Constitutive promoters from miscellaneous eukaryotes

| Name | Description | Promoter Sequence | Length |
|---|---|---|---|
| BBa_I712004 | CMV promoter | . . . | 654 |
| SEQ ID NO: 738 | | agaacccactgcttactggcttatcgaaat | |
| BBa_K076017 | Ubc Promoter | . . . | 1219 |
| SEQ ID NO: 739 | | ggccgtttttggcttttttgttagacgaag | |

TABLE 28K
Promoters

| Name | Sequence | Description |
|---|---|---|
| Plpp | ataagtgccttcccatcaaaaaaatattctc | The Plpp promoter is a natural promoter |
| SEQ ID | aacataaaaaactttgtgtaatacttgtaac | taken from the Nissle genome. In situ it is |
| NO: 740 | gcta | used to drive production of lpp, which is |
| | | known to be the most abundant protein in the |
| | | cell. Also, in some previous RNAseq |
| | | experiments I was able to confirm that the |
| | | lpp mRNA is one of the most abundant |
| | | mRNA in Nissle during exponential growth. |
| PapFAB46 | AAAAAGAGTATTGACTTC | See, e.g., Kosuri, S., Goodman, D. B. & |
| SEQ ID | GCATCTTTTTGTACCTATA | Cambray, G. Composability of regulatory |
| NO: 741 | ATAGATTCATTGCTA | sequences controlling transcription and |
| | | translation in Escherichia coli. in 1-20 |
| | | (2013). doi:10.1073/pnas. |
| PJ23101+ | ggaaaatttttttaaaaaaaaaactttacag | UP element helps recruit RNA polymerase |
| UP element | ctagctcagtcctaggtattatgctagc | (ggaaaatttttttaaaaaaaaaac) |
| SEQ ID | | |
| NO: 742 | | |
| PJ23107+ | ggaaaatttttttaaaaaaaaaactttacgg | UP element helps recruit RNA polymerase |
| UP element | ctagctcagccctaggtattatgctagc | (ggaaaatttttttaaaaaaaaaac) |
| SEQ ID | | |
| NO: 743 | | |
| PSYN2311 | ggaaaatttttttaaaaaaaaaacTTGA | UP element at 5' end; consensus -10 region |
| 9 | CAGCTAGCTCAGTCCTTG | is TATAAT; the consensus -35 is TTGACA; |
| SEQ ID | GTATAATGCTAGCACGAA | the extended -10 region is generally |
| NO: 744 | | TGNTATAAT (TGGTATAAT in this |
| | | sequence) |

[0876] Bacterial constitutive promoters are known in the art. Examplary constitutive promoters are listed in the following Tables. In some embodiments, the constitutive promoter is at least about 80%, at least about 85%, at least about 90%, at least about 95%, or at least about 99% homologous to the sequence of any one of SEQ ID NOs: 598-744.

[0877] Ribosome Binding Sites

[0878] In some embodiments, ribosome binding sites are added, switched out or replaced. By testing a few ribosome binding sites, expression levels can be fine-tuned to the desired level. Table A and Table B lists a number RBS which are suitable for prokaryotic expression and can be used to achieve the desired expression levels (See, e.g., Registry of standard biological parts).

TABLE 29A
Selected Ribosome Binding Sites

| | | SEQ ID |
|---|---|---|
| Identifier | Sequence^{a} | NO |
| Master Sequence | TCTAGAGAAAGANNNGANNNACTAGATG | 1018 |
| BBa_J61100 | TCTAGAGAAAGAGGGGACAAACTAGATG | 1019 |
| BBa_J61101 | TCTAGAGAAAGACAGGACCCACTAGATG | 1020 |
| BBa_J61102 | TCTAGAGAAAGATCCGATGTACTAGATG | 1021 |
| BBa_J61103 | TCTAGAGAAAGATTAGACAAACTAGATG | 1022 |
| BBa_J61104 | TCTAGAGAAAGAAGGGACAGACTAGATG | 1023 |
| BBa_J61105 | TCTAGAGAAAGACATGACGTACTAGATG | 1024 |
| BBa_J61106 | TCTAGAGAAAGATAGGAGACACTAGATG | 1025 |
| BBa_J61107 | TCTAGAGAAAGAAGAGACTCACTAGATG | 1026 |
| BBa_J61108 | TCTAGAGAAAGACGAGATATACTAGATG | 1027 |
| BBa_J61109 | TCTAGAGAAAGACTGGAGACACTAGATG | 1028 |
| BBa_J61110 | TCTAGAGAAAGAGGCGAATTACTAGATG | 1029 |
| BBa_J61111 | TCTAGAGAAAGAGGCGATACACTAGATG | 1030 |
| BBa_J61112 | TCTAGAGAAAGAGGTGACATACTAGATG | 1031 |
| BBa_J61113 | TCTAGAGAAAGAGTGGAAAAACTAGATG | 1032 |
| BBa_J61114 | TCTAGAGAAAGATGAGAAGAACTAGATG | 1033 |
| BBa_J61115 | TCTAGAGAAAGAAGGGATACACTAGATG | 1034 |
| BBa_J61116 | TCTAGAGAAAGACATGAGGCACTAGATG | 1035 |
| BBa_J61117 | TCTAGAGAAAGACATGAGTTACTAGATG | 1036 |
| BBa_J61118 | TCTAGAGAAAGAGACGAATCACTAGATG | 1037 |
| BBa_J61119 | TCTAGAGAAAGATTTGATATACTAGATG | 1038 |
| BBa_J61120 | TCTAGAGAAAGACGCGAGAAACTAGATG | 1039 |
| BBa_J61121 | TCTAGAGAAAGAGACGAGTCACTAGATG | 1040 |
| BBa_J61122 | TCTAGAGAAAGAGAGGAGCCACTAGATG | 1041 |
| BBa_J61123 | TCTAGAGAAAGAGATGACTAACTAGATG | 1042 |
| BBa_J61124 | TCTAGAGAAAGAGCCGACATACTAGATG | 1043 |
| BBa_J61125 | TCTAGAGAAAGAGCCGAGTTACTAGATG | 1044 |
| BBa_J61126 | TCTAGAGAAAGAGGTGACTCACTAGATG | 1045 |
| BBa_J61127 | TCTAGAGAAAGAGTGGAACTACTAGATG | 1046 |
| BBa_J61128 | TCTAGAGAAAGATAGGACTCACTAGATG | 1047 |
| BBa_J61129 | TCTAGAGAAAGATTGGACGTACTAGATG | 1048 |
| BBa_J61130 | TCTAGAGAAAGAAACGACATACTAGATG | 1049 |
| BBa_J61131 | TCTAGAGAAAGAACCGAATTACTAGATG | 1050 |
| BBa_J61132 | TCTAGAGAAAGACAGGATTAACTAGATG | 873 |
| BBa_J61133 | TCTAGAGAAAGACCCGAGACACTAGATG | 869 |
| BBa_J61134 | TCTAGAGAAAGACCGGAAATACTAGATG | 870 |
| BBa_J61135 | TCTAGAGAAAGACCGGAGACACTAGATG | 871 |
| BBa_J61136 | TCTAGAGAAAGAGCTGAGCAACTAGATG | 874 |
| BBa_J61137 | TCTAGAGAAAGAGTAGATCAACTAGATG | 875 |
| BBa_J61138 | TCTAGAGAAAGATATGAATAACTAGATG | 876 |
| BBa_J61139 | TCTAGAGAAAGATTAGAGTCACTAGATG | 877 |

TABLE 29B
Selected Ribosome Binding Sites

| Identifier | Sequence^{a} | SEQ ID NO |
|---|---|---|
| BBa_B0029 | TCTAGAGTTCACACAGGAAACCTACTAGATG | 880 |
| BBa_B0030 | TCTAGAGATTAAAGAGGAGAAATACTAGATG | 881 |
| BBa_B0031 | TCTAGAGTCACACAGGAAACCTACTAGATG | 882 |
| BBa_B0032 | TCTAGAGTCACACAGGAAAGTACTAGATG | 883 |
| BBa_B0033 | TCTAGAGTCACACAGGACTACTAGATG | 884 |
| BBa_B0034 | TCTAGAGAAAGAGGAGAAATACTAGATG | 885 |
| BBa_B0035 | TCTAGAGATTAAAGAGGAGAATACTAGATG | 886 |
| BBa_B0064 | TCTAGAGAAAGAGGGGAAATACTAGATG | 887 |

[0879] Multiple Mechanisms of Action

[0880] In some embodiments, the bacteria are genetically engineered to include multiple mechanisms of action (MOAs), e.g., circuits producing multiple copies of the same product (e.g., to enhance copy number) or circuits performing multiple different functions. Examples of insertion sites include, but are not limited to, malE/K, insB/I, araC/BAD, lacZ, dapA, cea, and other shown in FIG. 52. For example, the genetically engineered bacteria may include four copies of GLP-2 inserted at four different insertion sites, e.g., malE/K, insB/I, arac/BAD, and lacZ. Alternatively, the genetically engineered bacteria may include three copies of GLP-2 inserted at three different insertion sites, e.g., malE/K, insB/I, and lacZ, and three copies of a butyrogenic gene cassette inserted at three different insertion sites, e.g., dapA, cea, and araC/BA

[0881] In some embodiments, the bacteria are genetically engineered to include multiple mechanisms of action (MOAs), e.g., circuits producing multiple copies of the same product (e.g., to enhance copy number) or circuits performing multiple different functions. For example, the genetically engineered bacteria may include four copies of the gene, gene(s), or gene cassettes for producing the payload(s) inserted at four different insertion sites. Alternatively, the genetically engineered bacteria may include three copies of the gene, gene(s), or gene cassettes for producing the payload(s) inserted at three different insertion sites and three copies of the gene, gene(s), or gene cassettes for producing the payload(s) inserted at three different insertion sites.

[0882] In some embodiments, the genetically engineered bacteria comprise one or more of (1) one or more gene(s) or gene cassette(s) for the production of propionate, as described herein (2) one or more gene(s) or gene cassette(s) for the production of butyrate, as described herein (3) one or more gene(s) or gene cassette(s) for the production of acetate, as described herein (4) one or more gene(s) or gene cassette(s) for the production of tryptophan and/or its metabolites (including but not limited to kynurenine, indole, indole-3-acetic acid, indole-3 aldehyde, and IPA), as described herein (5) one or more gene(s) or gene cassette(s) for the production of one or more of GLP-2 and GLP-2 analogs, as described herein (6) one or more gene(s) or gene cassette(s) for the production of human or viral or monomerized IL-10, as described herein (7) one or more gene(s) or gene cassette(s) for the production of human IL-22, as described herein (8) one or more gene(s) or gene cassette(s) for the production of IL-2, and/or SOD, and/or IL-27 and other interleukins, as described herein (9) one or more gene(s) or gene cassette(s) for the production of one or more transporters, e.g. for the import of tryptophan and/or metabolites as described herein (10) one or more polypeptides for secretion, including but not limited to GLP-2 and its analogs, IL-10, and/or IL-22, SCFA and/or tryptophan synthesis and/or catabolic enzymes in wild type or in mutated form (for increased stability or metabolic activity) (11) one or more components of secretion machinery, as described herein (12) one or more auxotrophies, e.g., deltaThyA (13) one more more antibiotic resistances, including but not limited to, kanamycin or chloramphenicol resistance (14) one or more mutations/deletions to increase the flux through a metabolic pathway encoded by one or more genes or gene cassette(s), e.g mutations/deletions in genes in NADH consuming pathways, genes involved in feedback inhibition of a metabolic pathway encoded by the gene(s) or gene cassette(s) genes, as described herein (15) one or more mutations/deletions in one or more genes of the endogenous metabolic pathways, e.g., tryptophan synthesis pathway.

[0883] In some embodiments, the genetically engineered bacteria promote one or more of the following effector functions: (1) neutralizes TNF-α, IFN-γ, IL-1β, IL-6, IL-8, IL-17, and/or chemokines, e.g., CXCL-8 and CCL2 (2) activates include AHR (e.g., which result in IL-22 production) and (3) activates PXR, (4) inhibits HDACs, (5) activates GPR41 and/or GPR43 and/or GPR109A, (6) inhibits NF-kappaB signaling, (7) modulators of PPARgamma, (8) activates of AMPK signaling, (9) modulates GLP-1 secretion and/or (10). scavenges hydroxyl radicals and functions as antioxidants.

[0884] In some embodiments, under conditions where the gene, gene(s), or gene cassettes for producing the payload(s) is expressed, the genetically engineered bacteria of the disclosure produce at least about 1.5-fold, at least about 2-fold, at least about 10-fold, at least about 15-fold, at least about 20-fold, at least about 30-fold, at least about 50-fold, at least about 100-fold, at least about 200-fold, at least about 300-fold, at least about 400-fold, at least about 500-fold, at least about 600-fold, at least about 700-fold, at least about 800-fold, at least about 900-fold, at least about 1,000-fold, or at least about 1,500-fold more of the payload(s) as compared to unmodified bacteria of the same subtype under the same conditions.

[0885] In some embodiments, the genetically engineered bacteria produce at least about 1.5-fold, at least about 2-fold, at least about 10-fold, at least about 15-fold, at least about 20-fold, at least about 30-fold, at least about 50-fold, at least about 100-fold, at least about 200-fold, at least about 300-fold, at least about 400-fold, at least about 500-fold, at least about 600-fold, at least about 700-fold, at least about 800-fold, at least about 900-fold, at least about 1,000-fold, or at least about 1,500-fold more of a payload under inducing conditions than unmodified bacteria of the same subtype under the same conditions. Certain unmodified bacteria will not have detectable levels of the payload. In embodiments using genetically modified forms of these bacteria, the payload will be detectable under inducing conditions.

[0886] In certain embodiments, the immune modulator molecule is butyrate. Methods of measuring butyrate levels, e.g., by mass spectrometry, gas chromatography, high-performance liquid chromatography (HPLC), are known in the art (see, e.g., Aboulnaga et al., 2013). In some embodiments, butyrate is measured as butyrate level/bacteria optical density (OD). In some embodiments, measuring the activity and/or expression of one or more gene products in the butyrogenic gene cassette serves as a proxy measurement for butyrate production. In some embodiments, the bacterial cells of the invention are harvested and lysed to measure butyrate production. In alternate embodiments, butyrate production is measured in the bacterial cell medium. In some embodiments, the genetically engineered bacteria produce at least about 1 nM/OD, at least about 10 nM/OD, at least about 100 nM/OD, at least about 500 nM/OD, at least about 1 μM/OD, at least about 10 μM/OD, at least about 100 μM/OD, at least about 500 μM/OD, at least about 1 mM/OD, at least about 2 mM/OD, at least about 3 mM/OD, at least about 5 mM/OD, at least about 10 mM/OD, at least about 20 mM/OD, at least about 30 mM/OD, or at least about 50 mM/OD of butyrate in low-oxygen conditions, in the presence of certain molecules or metabolites, in the presence of molecules or metabolites associated with liver damage, inflammation or an inflammatory response, or in the presence of some other metabolite that may or may not be present in the gut, such as arabinose.

[0887] In certain embodiments, the immune modulator molecule is propionate. Methods of measuring propionate levels, e.g., by mass spectrometry, gas chromatography, high-performance liquid chromatography (HPLC), are known in the art (see, e.g., Hillman 1978; Lukovac et al., 2014). In some embodiments, measuring the activity and/or expression of one or more gene products in the propionate gene cassette serves as a proxy measurement for propionate production. In some embodiments, the bacterial cells of the invention are harvested and lysed to measure propionate production. In alternate embodiments, propionate production is measured in the bacterial cell medium. In some embodiments, the genetically engineered bacteria produce at least about 1 PM, at least about 10 μM, at least about 100 μM, at least about 500 μM, at least about 1 mM, at least about 2 mM, at least about 3 mM, at least about 5 mM, at least about 10 mM, at least about 15 mM, at least about 20 mM, at least about 30 mM, at least about 40 mM, or at least about 50 mM of propionate in low-oxygen conditions, in the presence of certain molecules or metabolites, in the presence of molecules or metabolites associated with liver damage, inflammation or an inflammatory response, or in the presence of some other metabolite that may or may not be present in the gut, such as arabinose.

[0888] In some embodiments, quantitative PCR (qPCR) is used to amplify, detect, and/or quantify mRNA expression levels of the gene, gene(s), or gene cassettes for producing the payload(s). Primers may be designed and used to detect mRNA in a sample according to methods known in the art. In some embodiments, a fluorophore is added to a sample reaction mixture that may contain payload RNA, and a thermal cycler is used to illuminate the sample reaction mixture with a specific wavelength of light and detect the subsequent emission by the fluorophore. The reaction mixture is heated and cooled to predetermined temperatures for predetermined time periods. In certain embodiments, the heating and cooling is repeated for a predetermined number of cycles. In some embodiments, the reaction mixture is heated and cooled to 90-100° C., 60-70° C., and 30-50° C. for a predetermined number of cycles. In a certain embodiment, the reaction mixture is heated and cooled to 93-97° C., 55-65° C., and 35-45° C. for a predetermined number of cycles. In some embodiments, the accumulating amplicon is quantified after each cycle of the qPCR. The number of cycles at which fluorescence exceeds the threshold is the threshold cycle (CT). At least one CT result for each sample is generated, and the CT result(s) may be used to determine mRNA expression levels of the payload(s).

[0889] In some embodiments, quantitative PCR (qPCR) is used to amplify, detect, and/or quantify mRNA expression levels of the payload(s). Primers may be designed and used to detect mRNA in a sample according to methods known in the art. In some embodiments, a fluorophore is added to a sample reaction mixture that may contain payload mRNA, and a thermal cycler is used to illuminate the sample reaction mixture with a specific wavelength of light and detect the subsequent emission by the fluorophore. The reaction mixture is heated and cooled to predetermined temperatures for predetermined time periods. In certain embodiments, the heating and cooling is repeated for a predetermined number of cycles. In some embodiments, the reaction mixture is heated and cooled to 90-100° C., 60-70° C., and 30-50° C. for a predetermined number of cycles. In a certain embodiment, the reaction mixture is heated and cooled to 93-97° C., 55-65° C., and 35-45° C. for a predetermined number of cycles. In some embodiments, the accumulating amplicon is quantified after each cycle of the qPCR. The number of cycles at which fluorescence exceeds the threshold is the threshold cycle (CT). At least one CT result for each sample is generated, and the CT result(s) may be used to determine mRNA expression levels of the payload(s).

[0890] In some embodiments, the genetically engineered bacteria comprise gene sequence(s) encoding short chain fatty acid production enzymes described herein and/or one or more gene sequence(s) encoding tryptophan catabolism enzyme(s) described herein and one or more gene sequence(s) encoding metabolite transporters described herein, and/or one or more gene sequence(s) encoding one or more therapeutic peptides for secretion, as described herein.

[0891] In some embodiments, the genetically engineered bacteria comprise a butyrate gene cassette and are capable of producing butyrate. In some embodiments, the genetically engineered bacteria comprise a propionate gene cassette and are capable of producing propionate. In some embodiments, the genetically engineered bacteria comprise a acetate gene cassette and are capable of producing acetate. In some embodiments, the genetically engineered bacteria comprise a gene sequence encoding IL-10. In some embodiments, the genetically engineered bacteria comprise a gene sequence encoding IL-2. In some embodiments, the genetically engineered bacteria comprise a gene sequence encoding IL-22. In some embodiments, the genetically engineered bacteria comprise a gene sequence encoding IL-27. In some embodiments, the genetically engineered bacteria comprise a gene sequence encoding SOD. In some embodiments, the genetically engineered bacteria comprise a gene sequence encoding GLP-2. In some embodiments, the genetically engineered bacteria are capable of producing kyurenine.

[0892] In some embodiments, the genetically engineered bacteria comprise a butyrate gene cassette and are capable of producing butyrate and comprise a gene sequence encoding IL-10. In some embodiments, the genetically engineered bacteria comprise a butyrate gene cassette and are capable of producing butyrate and comprise a gene sequence encoding IL-2. In some embodiments, the genetically engineered bacteria comprise a butyrate gene cassette and are capable of producing butyrate and comprise a gene sequence encoding IL-22. In some embodiments, the genetically engineered bacteria comprise a butyrate gene cassette and are capable of producing butyrate and comprise a gene sequence encoding IL-27. In some embodiments, the genetically engineered bacteria comprise a butyrate gene cassette and are capable of producing butyrate and comprise a gene sequence encoding SOD. In some embodiments, the genetically engineered bacteria comprise a butyrate gene cassette and are capable of producing butyrate and comprise a gene sequence encoding GLP-2. In some embodiments, the genetically engineered bacteria comprise a butyrate gene cassette and are capable of producing butyrate and are capable of producing kyurenine.

[0893] In some embodiments, the genetically engineered bacteria comprise a butyrate gene cassette and are capable of producing butyrate and comprise a gene sequence encoding IL-10 and one or more gene sequences encoding IL-2, IL-22, IL-27, GLP-2, and SOD. In any of these embodiments the bacteria comprise a propionate gene cassette and can produce propionate. In any of these embodiments, the bacteria can produce kyuernine.

[0894] In some embodiments, the genetically engineered bacteria comprise a butyrate gene cassette and are capable of producing butyrate and comprise a gene sequence encoding IL-2 and one or more gene sequences encoding IL-10, IL-22, IL-27, GLP-2, and SOD. In any of these embodiments the bacteria comprise a propionate gene cassette and can produce propionate. In any of these embodiments, the bacteria can produce kyuernine. In some embodiments, the genetically engineered bacteria comprise a butyrate gene cassette and are capable of producing butyrate and comprise a gene sequence encoding IL-22 and one or more gene sequences encoding IL-2, IL-10, IL-27, GLP-2, and SOD. In any of these embodiments the bacteria comprise a propionate gene cassette and can produce propionate. In any of these embodiments, the bacteria can produce kyuernine. In some embodiments, the genetically engineered bacteria comprise a butyrate gene cassette and are capable of producing butyrate and comprise a gene sequence encoding IL-27 and one or more gene sequences encoding IL-2, IL-22, IL-10, GLP-2, and SOD. In any of these embodiments the bacteria comprise a propionate gene cassette and can produce propionate. In any of these embodiments, the bacteria can produce kyuernine. In some embodiments, the genetically engineered bacteria comprise a butyrate gene cassette and are capable of producing butyrate and comprise a gene sequence encoding GLP-2 and one or more gene sequences encoding IL-2, IL-22, IL-27, IL-10, and SOD. In any of these embodiments the bacteria comprise a propionate gene cassette and can produce propionate. In any of these embodiments, the bacteria can produce kyuernine.

[0895] In some embodiments, the genetically engineered bacteria comprise a butyrate gene cassette and are capable of producing butyrate and comprise a gene sequence encoding SOD and one or more gene sequences encoding IL-2, IL-22, IL-27, GLP-2, and IL-10. In any of these embodiments the bacteria comprise a propionate gene cassette and can produce propionate. In any of these embodiments, the bacteria can produce kyuernine.

[0896] In some embodiments, the genetically engineered bacteria comprise a gene sequence encoding IL-10 and a gene sequence(s) encoding one or more molecules selected from IL-2, IL-22, IL-27, GLP-2, and SOD. In some embodiments, the genetically engineered bacteria comprise a gene sequence encoding IL-2 and a gene sequence(s) encoding one or more molecules selected from IL-10, IL-22, IL-27, GLP-2, and SOD. In some embodiments, the genetically engineered bacteria comprise a gene sequence encoding IL-22 and a gene sequence(s) encoding one or more molecules selected from IL-2, IL-27, IL-10, GLP-2, and SOD. In some embodiments, the genetically engineered bacteria comprise a gene sequence(s) encoding IL-27 and a gene sequence encoding one or more molecules selected from IL-2, IL-22, IL-10, GLP-2, and SOD. In some embodiments, the genetically engineered bacteria comprise a gene sequence encoding SOD and a gene sequence(s) encoding one or more molecules selected from IL-2, IL-22, IL-27, GLP-2, and IL-10. In some embodiments, the genetically engineered bacteria comprise a gene sequence encoding GLP-2 and a gene sequence(s) encoding one or more molecules selected from IL-2, IL-22, IL-27, IL-10, and SOD. In any of these embodiments, the genetically engineered bacteria are capable of producing kyurenine. In any of these embodiments, the genetically engineered bacteria are capable of producing butyrate. In any of these embodiments, the genetically engineered bacteria are capable of producing propionate. In any of these embodiments, the genetically engineered bacteria are capable of producing acetate.

[0897] In some embodiments, the gene sequence(s) encoding the one or more short chain fatty acid production enzyme(s) and/or tryptophan catabolism enzyme(s) and/or tryptophan biosynthesis enzyme(s) and/or metabolite transporters and/or therapeutic peptides for secretion are expressed under the control of a constitutive promoter. In another embodiment, the gene sequence(s) encoding the one or more short chain fatty acid production enzyme(s) and/or tryptophan catabolism enzyme(s) and/or tryptophan biosynthesis enzyme(s) and/or metabolite transporters and/or therapeutic peptides for secretion are expressed under the control of an inducible promoter. In some embodiments, the gene sequence(s) encoding the one or more short chain fatty acid production enzyme(s) and/or tryptophan catabolism enzyme(s) and/or tryptophan biosynthesis enzyme(s) and/or metabolite transporters and/or therapeutic peptides for secretion are expressed under the control of a promoter that is directly or indirectly induced by exogenous environmental conditions. In one embodiment, the gene sequence(s) encoding the one or more short chain fatty acid production enzyme(s) and/or tryptophan catabolism enzyme(s) and/or tryptophan biosynthesis enzyme(s) and/or metabolite transporters and/or therapeutic peptides for secretion are expressed under the control of a promoter that is directly or indirectly induced by low-oxygen or anaerobic conditions, wherein expression of the gene sequence(s) encoding the one or more short chain fatty acid production enzyme(s) and/or tryptophan catabolism enzyme(s) and/or tryptophan biosynthesis enzyme(s) and/or metabolite transporters and/or therapeutic peptides for secretion are activated under low-oxygen or anaerobic environments, such as the environment of the mammalian gut. In some embodiments, the gene sequence(s) encoding the one or more short chain fatty acid production enzyme(s) and/or tryptophan catabolism enzyme(s) and/or tryptophan biosynthesis enzyme(s) and/or metabolite transporters and/or therapeutic peptides for secretion are expressed under the control of a promoter that is directly or indirectly induced by inflammatory conditions. Exemplary inducible promoters described herein include oxygen level-dependent promoters (e.g., FNR-inducible promoter), promoters induced by inflammation or an inflammatory response (RNS, ROS promoters), and promoters induced by a metabolite that may or may not be naturally present (e.g., can be exogenously added) in the gut, e.g., arabinose and tetracycline. Examples of inducible promoters include, but are not limited to, an FNR responsive promoter, a P_{araC} promoter, a P_{araBAD} promoter, and a P_{TetR} promoter, each of which are described in more detail herein. Inducible promoters are described in more detail infra.

[0898] The at least one gene encoding the at least one short chain fatty acid production enzyme(s) and/or tryptophan catabolism enzyme(s) and/or tryptophan biosynthesis enzyme(s) and/or metabolite transporters and/or therapeutic peptides for secretion may be present on a plasmid or chromosome in the bacterial cell. In one embodiment, the gene sequence(s) encoding the one or more short chain fatty acid production enzyme(s) and/or tryptophan catabolism enzyme(s) and/or tryptophan biosynthesis enzyme(s) and/or metabolite transporters and/or therapeutic peptides for secretion are located on a plasmid in the bacterial cell. In another embodiment, the gene sequence(s) encoding the one or more short chain fatty acid production enzyme(s) and/or tryptophan catabolism enzyme(s) and/or tryptophan biosynthesis enzyme(s) and/or metabolite transporters and/or therapeutic peptides for secretion are located in the chromosome of the bacterial cell. In yet another embodiment, a native copy of the gene sequence(s) encoding the one or more short chain fatty acid production enzyme(s) and/or tryptophan catabolism enzyme(s) and/or tryptophan biosynthesis enzyme(s) and/or metabolite transporters and/or therapeutic peptides for secretion are located in the chromosome of the bacterial cell, and at least one gene encoding at least one short chain fatty acid production enzyme(s) and/or tryptophan catabolism enzyme(s) and/or tryptophan biosynthesis enzyme(s) and/or metabolite transporters and/or therapeutic peptides for secretion from a different species of bacteria are located on a plasmid in the bacterial cell. In yet another embodiment, a native copy of the gene sequence(s) encoding the one or more short chain fatty acid production enzyme(s) and/or tryptophan catabolism enzyme(s) and/or tryptophan biosynthesis enzyme(s) and/or metabolite transporters and/or therapeutic peptides for secretion are located on a plasmid in the bacterial cell, and at least one gene encoding the at least one one short chain fatty acid production enzyme(s) and/or tryptophan catabolism enzyme(s) and/or tryptophan biosynthesis enzyme(s) and/or metabolite transporters and/or therapeutic peptides for secretion from a different species of bacteria are located on a plasmid in the bacterial cell. In yet another embodiment, a native copy of the gene sequence(s) encoding the one or more short chain fatty acid production enzyme(s) and/or tryptophan catabolism enzyme(s) and/or tryptophan biosynthesis enzyme(s) and/or metabolite transporters and/or therapeutic peptides for secretion are located in the chromosome of the bacterial cell, and at least one gene encoding the at least one one short chain fatty acid production enzyme(s) and/or tryptophan catabolism enzyme(s) and/or tryptophan biosynthesis enzyme(s) and/or metabolite transporters and/or therapeutic peptides for secretion from a different species of bacteria are located in the chromosome of the bacterial cell.

[0899] In some embodiments, the gene sequence(s) encoding the one or more short chain fatty acid production enzyme(s) and/or tryptophan catabolism enzyme(s) and/or tryptophan biosynthesis enzyme(s) and/or metabolite transporters and/or therapeutic peptides for secretion are expressed on a low-copy plasmid. In some embodiments, the gene sequence(s) encoding the one or more short chain fatty acid production enzyme(s) and/or tryptophan catabolism enzyme(s) and/or tryptophan biosynthesis enzyme(s) and/or metabolite transporters and/or therapeutic peptides for secretion are expressed on a high-copy plasmid. In some embodiments, the high-copy plasmid may be useful for increasing expression of the at least one short chain fatty acid production enzyme(s) and/or tryptophan catabolism enzyme(s) and/or tryptophan biosynthesis enzyme(s) and/or metabolite transporters and/or therapeutic peptides for secretion.

[0900] In some embodiments, a recombinant bacterial cell of the invention comprising at least one gene encoding at least one short chain fatty acid production enzyme(s) and/or tryptophan catabolism enzyme(s) and/or tryptophan biosynthesis enzyme(s) and/or metabolite transporters and/or therapeutic peptides for secretion are expressed on a high-copy plasmid do not increase tryptophan catabolism as compared to a recombinant bacterial cell comprising the same gene expressed on a low-copy plasmid in the absence of a heterologous importer of tryptophan and/or its metabolites and additional copies of a native importer of tryptophan and/or its metabolites. In alternate embodiments, the importer of tryptophan and/or its metabolites is used in conjunction with a high-copy plasmid.

[0901] In some embodiments, the genetically engineered bacteria described above further comprise one or more of the modifications, mutations, and/or deletions in endogenous genes described herein.

[0902] In some embodiments, the the genetically engineered microorganism further comprises a mutation and/or deletion in ldhA. In some embodiments, the genetically engineered microorganism further comprises a mutation and/or deletion in frdA. In some embodiments, the genetically engineered microorganism further comprises a mutation and/or deletion in adhE. In some embodiments, the the genetically engineered microorganism further comprises a mutation and/or deletion in one or more of ldhA, frdA, and adhE.

[0903] In some embodiments, surface display could be used to display a protein of interest on the surface of the genetically modified bacterium. In some embodiments, the genetically engineered bacteria and/or microorganisms encode one or more gene(s) and/or gene cassette(s) encoding a protein of interest, e.g., an anti-inflammation and/or gut barrier function enhancer molecule, which is anchored or displayed on the surface of the bacteria and/or microorganisms.

[0904] Induction of Payloads During Strain Culture

[0905] In some embodiments, it is desirable to pre-induce payload or protein of interest expression and/or payload activity prior to administration. Such payload or protein of interest may be an effector intended for secretion or may be an enzyme which catalyzes a metabolic reaction to produce an effector. In other embodiments, the protein of interest is an enzyme which catabolizes a harmful metabolite. In such situations, the strains are pre-loaded with active payload or protein of interest. In such instances, the genetically engineered bacteria of the invention express one or more protein(s) of interest, under conditions provided in bacterial culture during cell growth, expansion, purification, fermentation, and/or manufacture prior to administration in vivo. Such culture conditions can be provided in a flask, fermenter or other appropriate culture vessel, e.g., used during cell growth, cell expansion, fermentation, recovery, purification, formulation, and/or manufacture. As used herein, the term “bacterial culture” or bacterial cell culture” or “culture” refers to bacterial cells or microorganisms, which are maintained or grown in vitro during several production processes, including cell growth, cell expansion, recovery, purification, fermentation, and/or manufacture. As used herein, the term “fermentation” refers to the growth, expansion, and maintenance of bacteria under defined conditions. Fermentation may occur under a number of cell culture conditions, including anaerobic or low oxygen or oxygenated conditions, in the presence of inducers, nutrients, at defined temperatures, and the like.

[0906] Culture conditions are selected to achieve optimal activity and viability of the cells, while maintaining a high cell density (high biomass) yield. A number of cell culture conditions and operating parameters are monitored and adjusted to achieve optimal activity, high yield and high viability, including oxygen levels (e.g., low oxygen, microaerobic, aerobic), temperature of the medium, and nutrients and/or different growth media, chemical and/or nutritional inducers and other components provided in the medium.

[0907] In some embodiments, the one or more protein(s) of interest and are directly or indirectly induced, while the strains is grown up for in vivo administration. Without wishing to be bound by theory, pre-induction may boost in vivo activity. This is particularly important in proximal regions of the gut which are reached first by the bacteria, e.g., the small intestine. If the bacterial residence time in this compartment is relatively short, the bacteria may pass through the small intestine without reaching full in vivo induction capacity. In contrast, if a strain is pre-induced and preloaded, the strains are already fully active, allowing for greater activity more quickly as the bacteria reach the intestine. Ergo, no transit time is “wasted”, in which the strain is not optimally active. As the bacteria continue to move through the intestine, in vivo induction occurs under environmental conditions of the gut (e.g., low oxygen, or in the presence of gut metabolites).

[0908] In one embodiment, expression of one or more payload(s), is induced during cell growth, cell expansion, fermentation, recovery, purification, formulation, and/or manufacture. In one embodiment, expression of several different proteins of interest is induced during cell growth, cell expansion, fermentation, recovery, purification, formulation, and/or manufacture. In one embodiment, expression of one or more payload(s), is driven from the same promoter as a multicistronic message. In one embodiment, expression of one or more payload(s) is driven from the same promoter as two or more separate messages. In one embodiment, expression of one or more payload(s) is driven from the one or more different promoters.

[0909] In some embodiments, the strains are administered without any pre-induction protocols during strain growth prior to in vivo administration.

[0910] Anaerobic Induction

[0911] In some embodiments, cells are induced under anaerobic or low oxygen conditions in culture. In such instances, cells are grown (e.g., for 1.5 to 3 hours) until they have reached a certain OD, e.g., ODs within the range of 0.1 to 10, indicating a certain density e.g., ranging from 1×10\hat{ }8 to 1×10\hat{ }11, and exponential growth and are then switched to anaerobic or low oxygen conditions for approximately 3 to 5 hours. In some embodiments, strains are induced under anaerobic or low oxygen conditions, e.g. to induce FNR promoter activity and drive expression of one or more payload(s) under the control of one or more FNR promoters.

[0912] In one embodiment, expression of one or more payload(s), is under the control of one or more anaerobic or low oxygen inducible promoter(s), e.g., FNR promoter(s), and is induced during cell growth, cell expansion, fermentation, recovery, purification, formulation, and/or manufacture under anaerobic or low oxygen conditions. In one embodiment, expression of several different proteins of interest is under the control of one or more anaerobic or low oxygen inducible promoter(s), e.g., FNR promoter(s) and is induced during cell growth, cell expansion, fermentation, recovery, purification, formulation, and/or manufacture under anaerobic or low oxygen conditions.

[0913] In one embodiment, expression of two or more payload(s), is under the control of one or more anaerobic or low oxygen inducible promoter(s), e.g., FNR promoter(s), and is driven from the same promoter in the form of a multicistronic message under anaerobic or low oxygen conditions. In one embodiment, expression of one or more payload(s), is under the control of one or more anaerobic or low oxygen inducible promoter(s), e.g., FNR promoter(s), and is driven from the same promoter as two or more separate messages under anaerobic or low oxygen conditions. In one embodiment, expression of one or more payload(s) under the control of one or more anaerobic or low oxygen inducible promoter(s), e.g., FNR promoter(s), and is driven from the one or more different promoters under anaerobic or low oxygen conditions.

[0914] Without wishing to be bound by theory, strains that comprise one or more payload(s) under the control of an FNR promoter, may allow expression of payload(s) from these promoters in vitro, under anaerobic or low oxygen culture conditions, and in vivo, under the low oxygen conditions found in the gut.

[0915] In some embodiments, promoters inducible by arabinose, IPTG, rhamnose, tetracycline, and/or other chemical and/or nutritional inducers can be induced under anaerobic or low oxygen conditions in the presence of the chemical and/or nutritional inducer. In some embodiments, strains may comprise a combination of gene sequence(s), some of which are under control of FNR promoters and others which are under control of promoters induced by chemical and/or nutritional inducers. In some embodiments, strains may comprise one or more payload gene sequence(s) under the control of one or more FNR promoter(s) and one or more payload gene sequence(s) which are induced by a one or more chemical and/or nutritional inducer(s), including, but not limited to, arabinose, IPTG, rhamnose, tetracycline, and/or other chemical and/or nutritional inducers described herein or known in the art. In some embodiments, strains may comprise one or more payload gene sequence(s) and/or under the control of one or more FNR promoter(s), and one or more payload gene sequence(s) under the control of a one or more constitutive promoter(s) described herein. In some embodiments, strains may comprise one or more payload gene sequence(s) under the control of an FNR promoter and one or more payload gene sequence(s) under the control of a one or more thermoregulated promoter(s) described herein.

[0916] In one embodiment, expression of one or more payload gene sequence(s) is under the control of one or more promoter(s) regulated by chemical and/or nutritional inducers and is induced during cell growth, cell expansion, fermentation, recovery, purification, formulation, and/or manufacture under anaerobic and/or low oxygen conditions. In one embodiment, the chemical and/or nutritional inducer is arabinose and the promoter is inducible by arabinose. In one embodiment, the chemical and/or nutritional inducer is IPTG and the promoter is inducible by IPTG. In one embodiment, the chemical and/or nutritional inducer is rhamnose and the promoter is inducible by rhamnose. In one embodiment, the chemical and/or nutritional inducer is tetracycline and the promoter is inducible by tetracycline.

[0917] In one embodiment, expression of one or more payload(s), is under the control of one or more promoter(s) regulated by chemical and/or nutritional inducers and is driven from the same promoter in the form of a multicistronic message under anaerobic and/or low oxygen conditions. In one embodiment, expression of one or more payload(s), is under the control of one or more promoter(s) regulated by chemical and/or nutritional inducers and is driven from the same promoter as two or more separate messages under anaerobic and/or low oxygen conditions. In one embodiment, expression of one or more payload(s), is under the control of one or more promoter(s) regulated by chemical and/or nutritional inducers and is driven from the one or more different promoters under anaerobic and/or low oxygen conditions.

[0918] In one embodiment, strains may comprise a combination of gene sequence(s), some of which are under control of a first inducible promoter and others which are under control of a second inducible promoter, both induced by chemical and/or nutritional inducers, under anaerobic or low oxygen conditions. In one embodiment, strains may comprise a combination of gene sequence(s), some of which are under control of a first inducible promoter and others which are under control of a second inducible promoter, both induced by chemical and/or nutritional inducers. In some embodiments, the strains comprise gene sequence(s) under the control of a a third inducible promoter, e.g., an anaerobic/low oxygen promoter, e.g., FNR promoter. In one embodiment, strains may comprise a combination of gene sequence(s), some of which are under control of a first inducible promoter, e.g., a chemically induced promoter or a low oxygen promoter and others which are under control of a second inducible promoter, e.g. a temperature sensitive promoter. In one embodiment, strains may comprise a combination of gene sequence(s), some of which are under control of a first inducible promoter, e.g., a FNR promoter and others which are under control of a second inducible promoter, e.g. a temperature sensitive promoter. In one embodiment, strains may comprise a combination of gene sequence(s), some of which are under control of a first inducible promoter, e.g., a chemically induced and others which are under control of a second inducible promoter, e.g. a temperature sensitive promoter. In some embodiments, strains may comprise one or more payload gene sequence(s) under the control of an FNR promoter and one or more payload gene sequence(s) under the control of a one or more promoter(s) which are induced by a one or more chemical and/or nutritional inducer(s), including, but not limited to, by arabinose, IPTG, rhamnose, tetracycline, and/or other chemical and/or nutritional inducers described herein or known in the art. Additionally the strains may comprise a construct which is under thermoregulatory control. In some embodiments, the bacteria strains further comprise payload sequence(s) under the control of one or more constitutive promoter(s) active under low oxygen conditions.

[0919] Aerobic Induction

[0920] In some embodiments, it is desirable to prepare, pre-load and pre-induce the strains under aerobic conditions. This allows more efficient growth and viability, and, in some cases, reduces the build-up of toxic metabolites. In such instances, cells are grown (e.g., for 1.5 to 3 hours) until they have reached a certain OD, e.g., ODs within the range of 0.1 to 10, indicating a certain density e.g., ranging from 1×10\hat{ }8 to 1×10\hat{ }11, and exponential growth and are then induced through the addition of the inducer or through other means, such as shift to a permissive temperature, for approximately 3 to 5 hours.

[0921] In some embodiments, promoters inducible by arabinose, IPTG, rhamnose, tetracycline, and/or other chemical and/or nutritional inducers described herein or known in the art can be induced under aerobic conditions in the presence of the chemical and/or nutritional inducer during cell growth, cell expansion, fermentation, recovery, purification, formulation, and/or manufacture. In one embodiment, expression of one or more payload(s) is under the control of one or more promoter(s) regulated by chemical and/or nutritional inducers and is induced during cell growth, cell expansion, fermentation, recovery, purification, formulation, and/or manufacture under aerobic conditions.

[0922] In one embodiment, expression of one or more payload(s), is under the control of one or more promoter(s) regulated by chemical and/or nutritional inducers and is driven from the same promoter in the form of a multicistronic message under aerobic conditions. In one embodiment, expression of one or more payload(s), is under the control of one or more promoter(s) regulated by chemical and/or nutritional inducers and is driven from the same promoter as two or more separate messages under aerobic conditions. In one embodiment, expression of one or more payload(s), is under the control of one or more promoter(s) regulated by chemical and/or nutritional inducers and is driven from the one or more different promoters under aerobic conditions.

[0923] In one embodiment, the chemical and/or nutritional inducer is arabinose and the promoter is inducible by arabinose. In one embodiment, the chemical and/or nutritional inducer is IPTG and the promoter is inducible by IPTG. In one embodiment, the chemical and/or nutritional inducer is rhamnose and the promoter is inducible by rhamnose. In one embodiment, the chemical and/or nutritional inducer is tetracycline and the promoter is inducible by tetracycline.

[0924] In some embodiments, promoters regulated by temperature are induced during cell growth, cell expansion, fermentation, recovery, purification, formulation, and/or manufacture. In one embodiment, expression of one or more payload(s) is driven directly or indirectly by one or more thermoregulated promoter(s) and is induced during cell growth, cell expansion, fermentation, recovery, purification, formulation, and/or manufacture under aerobic conditions.

[0925] In one embodiment, expression of one or more payload(s) is driven directly or indirectly by one or more thermoregulated promoter(s) and is driven from the same promoter in the form of a multicistronic message under aerobic conditions. In one embodiment, expression of one or more payload(s) is driven directly or indirectly by one or more thermoregulated promoter(s) and is driven from the same promoter as two or more separate messages under aerobic conditions. In one embodiment, expression of one or more payload(s) is driven directly or indirectly by one or more thermoregulated promoter(s) and is driven from the one or more different promoters under aerobic conditions.

[0926] In one embodiment, strains may comprise a combination of gene sequence(s), some of which are under control of a first inducible promoter and others which are under control of a second inducible promoter, both induced under aerobic conditions. In some embodiments, a strain comprises three or more different promoters which are induced under aerobic culture conditions.

[0927] In one embodiment, strains may comprise a combination of gene sequence(s), some of which are under control of a first inducible promoter and others which are under control of a second inducible promoter, both induced by chemical and/or nutritional inducers. In one embodiment, strains may comprise a combination of gene sequence(s), some of which are under control of a first inducible promoter, e.g. a chemically inducible promoter, and others which are under control of a second inducible promoter, e.g. a temperature sensitive promoter under aerobic culture conditions. In some embodiments two or more chemically induced promoter gene sequence(s) are combined with a thermoregulated construct described herein. In one embodiment, the chemical and/or nutritional inducer is arabinose and the promoter is inducible by arabinose. In one embodiment, the chemical and/or nutritional inducer is IPTG and the promoter is inducible by IPTG. In one embodiment, the chemical and/or nutritional inducer is rhamnose and the promoter is inducible by rhamnose. In one embodiment, the chemical and/or nutritional inducer is tetracycline and the promoter is inducible by tetracycline.

[0928] In one embodiment, strains may comprise a combination of gene sequence(s), some of which are under control of a first inducible promoter, e.g., a FNR promoter and others which are under control of a second inducible promoter, e.g. a temperature sensitive promoter. In one embodiment, strains may comprise a combination of gene sequence(s), some of which are under control of a first inducible promoter, e.g., a chemically induced and others which are under control of a second inducible promoter, e.g. a temperature sensitive promoter. In some embodiments, strains may comprise one or more payload gene sequence(s) under the control of an FNR promoter and one or more payload gene sequence(s) under the control of a one or more promoter(s) which are induced by a one or more chemical and/or nutritional inducer(s), including, but not limited to, by arabinose, IPTG, rhamnose, tetracycline, and/or other chemical and/or nutritional inducers described herein or known in the art. Additionally the strains may comprise a construct which is under thermoregulatory control. In some embodiments, the bacteria strains further comprise payload sequences under the control of one or more constitutive promoter(s) active under aerobic conditions.

[0929] In some embodiments, genetically engineered strains comprise gene sequence(s) which are induced under aerobic culture conditions. In some embodiments, these strains further comprise FNR inducible gene sequence(s) for in vivo activation in the gut. In some embodiments, these strains do not further comprise FNR inducible gene sequence(s) for in vivo activation in the gut.

[0930] In some embodiments, genetically engineered strains comprise gene sequence(s), which are arabinose inducible under aerobic culture conditions. In some embodiments, these strains do not further comprise FNR inducible gene sequence(s) for in vivo activation in the gut.

[0931] In some embodiments, genetically engineered strains comprise gene sequence(s), which are IPTG inducible under aerobic culture conditions. In some embodiments, these strains further comprise FNR inducible gene sequence(s) for in vivo activation in the gut. In some embodiments, these strains do not further comprise FNR inducible gene sequence(s) for in vivo activation in the gut.

[0932] In some embodiments, genetically engineered strains comprise gene sequence(s) which are arabinose inducible under aerobic culture conditions. In some embodiments, such a strain further comprises sequence(s) which are IPTG inducible under aerobic culture conditions. In some embodiments, these strains further comprise FNR inducible gene payload sequence(s) for in vivo activation in the gut. In some embodiments, these strains do not further comprise FNR inducible gene sequence(s) for in vivo activation in the gut.

[0933] As evident from the above non-limiting examples, genetically engineered strains comprise inducible gene sequence(s) which can be induced numerous combinations. For example, rhamnose or tetracycline can be used as an inducer with the appropriate promoters in addition or in lieu of arabinose and/or IPTG or with thermoregulation. Additionally, such bacterial strains can also be induced with the chemical and/or nutritional inducers under anaerobic conditions.

[0934] Microaerobic Induction

[0935] In some embodiments, viability, growth, and activity are optimized by pre-inducing the bacterial strain under microaerobic conditions. In some embodiments, microaerobic conditions are best suited to “strike a balance” between optimal growth, activity and viability conditions and optimal conditions for induction; in particular, if the expression of the one or more payload(s) are driven by an anaerobic and/or low oxygen promoter, e.g., a FNR promoter. In such instances, cells are grown (e.g., for 1.5 to 3 hours) until they have reached a certain OD, e.g., ODs within the range of 0.1 to 10, indicating a certain density e.g., ranging from 1×10\hat{ }8 to 1×10\hat{ }11, and exponential growth and are then induced through the addition of the inducer or through other means, such as shift to at a permissive temperature, for approximately 3 to 5 hours.

[0936] In one embodiment, expression of one or more payload(s) is under the control of one or more FNR promoter(s) and is induced during cell growth, cell expansion, fermentation, recovery, purification, formulation, and/or manufacture under microaerobic conditions.

[0937] In one embodiment, expression of one or more payload(s), is under the control of one or more FNR promoter(s) and is driven from the same promoter in the form of a multicistronic message under microaerobic conditions. In one embodiment, expression of one or more payload(s), is under the control of one or more FNR promoter(s) and is driven from the same promoter as two or more separate messages under microaerobic conditions. In one embodiment, expression of one or more payload(s), is under the control of one or more FNR promoter(s) and is driven from the one or more different promoters under microaerobic conditions.

[0938] Without wishing to be bound by theory, strains that comprise one or more payload(s) under the control of an FNR promoter, may allow expression of payload(s) from these promoters in vitro, under microaerobic culture conditions, and in vivo, under the low oxygen conditions found in the gut.

[0939] In some embodiments, promoters inducible by arabinose, IPTG, rhamnose, tetracycline, and/or other chemical and/or nutritional inducers can be induced under microaerobic conditions in the presence of the chemical and/or nutritional inducer. In particular, strains may comprise a combination of gene sequence(s), some of which are under control of FNR promoters and others which are under control of promoters induced by chemical and/or nutritional inducers. In some embodiments, strains may comprise one or more payload gene sequence(s) sequence(s) under the control of one or more FNR promoter(s) and one or more payload gene sequence(s) under the control of a one or more promoter(s) which are induced by a one or more chemical and/or nutritional inducer(s), including, but not limited to, arabinose, IPTG, rhamnose, tetracycline, and/or other chemical and/or nutritional inducers described herein or known in the art. In some embodiments, strains may comprise one or more payload gene sequence(s) under the control of one or more FNR promoter(s), and one or more payload gene sequence(s) under the control of a one or more constitutive promoter(s) described herein. In some embodiments, strains may comprise one or more payload gene sequence(s) under the control of an FNR promoter and one or more payload gene sequence(s) under the control of a one or more thermoregulated promoter(s) described herein.

[0940] In one embodiment, expression of one or more payload(s) is under the control of one or more promoter(s) regulated by chemical and/or nutritional inducers and is induced during cell growth, cell expansion, fermentation, recovery, purification, formulation, and/or manufacture under microaerobic conditions.

[0941] In one embodiment, expression of one or more payload(s), is under the control of one or more promoter(s) regulated by chemical and/or nutritional inducers and is driven from the same promoter in the form of a multicistronic message under microaerobic conditions. In one embodiment, expression of one or more payload(s), is under the control of one or more promoter(s) regulated by chemical and/or nutritional inducers and is driven from the same promoter as two or more separate messages under microaerobic conditions. In one embodiment, expression of one or more payload(s), is under the control of one or more promoter(s) regulated by chemical and/or nutritional inducers and is driven from the one or more different promoters under microaerobic conditions.

[0942] In one embodiment, strains may comprise a combination of gene sequence(s), some of which are under control of a first inducible promoter and others which are under control of a second inducible promoter, both induced by chemical and/or nutritional inducers, under microaerobic conditions. In one embodiment, strains may comprise a combination of gene sequence(s), some of which are under control of a first inducible promoter and others which are under control of a second inducible promoter, both induced by chemical and/or nutritional inducers. In some embodiments, the strains comprise gene sequence(s) under the control of a third inducible promoter, e.g., an anaerobic/low oxygen promoter or microaerobic promoter, e.g., FNR promoter. In one embodiment, strains may comprise a combination of gene sequence(s), some of which are under control of a first inducible promoter, e.g., a chemically induced promoter or a low oxygen or microaerobic promoter and others which are under control of a second inducible promoter, e.g. a temperature sensitive promoter. In one embodiment, strains may comprise a combination of gene sequence(s), some of which are under control of a first inducible promoter, e.g., a FNR promoter and others which are under control of a second inducible promoter, e.g. a temperature sensitive promoter. In one embodiment, strains may comprise a combination of gene sequence(s), some of which are under control of a first inducible promoter, e.g., a chemically induced and others which are under control of a second inducible promoter, e.g. a temperature sensitive promoter. In some embodiments, strains may comprise one or more payload gene sequence(s) under the control of an FNR promoter and one or more payload gene sequence(s) under the control of a one or more promoter(s) which are induced by a one or more chemical and/or nutritional inducer(s), including, but not limited to, by arabinose, IPTG, rhamnose, tetracycline, and/or other chemical and/or nutritional inducers described herein or known in the art. Additionally the strains may comprise a construct which is under thermoregulatory control. In some embodiments, the bacteria strains further comprise payload under the control of one or more constitutive promoter(s) active under low oxygen conditions.

[0943] Induction of Strains Using Phasing, Pulsing and/or Cycling

[0944] In some embodiments, cycling, phasing, or pulsing techniques are employed during cell growth, expansion, recovery, purification, fermentation, and/or manufacture to efficiently induce and grow the strains prior to in vivo administration. This method is used to “strike a balance” between optimal growth, activity, cell health, and viability conditions and optimal conditions for induction; in particular, if growth, cell health or viability are negatively affected under inducing conditions. In such instances, cells are grown (e.g., for 1.5 to 3 hours) in a first phase or cycle until they have reached a certain OD, e.g., ODs within the range of 0.1 to 10, indicating a certain density e.g., ranging from 1×10\hat{ }8 to 1×10\hat{ }11, and are then induced through the addition of the inducer or through other means, such as shift to a permissive temperature (if a promoter is thermoregulated), or change in oxygen levels (e.g., reduction of oxygen level in the case of induction of an FNR promoter driven construct) for approximately 3 to 5 hours. In a second phase or cycle, conditions are brought back to the original conditions which support optimal growth, cell health and viability. Alternatively, if a chemical and/or nutritional inducer is used, then the culture can be spiked with a second dose of the inducer in the second phase or cycle.

[0945] In some embodiments, two cycles of optimal conditions and inducing conditions are employed (i.e, growth, induction, recovery and growth, induction). In some embodiments, three cycles of optimal conditions and inducing conditions are employed. In some embodiments, four or more cycles of optimal conditions and inducing conditions are employed. In a non-liming example, such cycling and/or phasing is used for induction under anaerobic and/or low oxygen conditions (e.g., induction of FNR promoters). In one embodiment, cells are grown to the optimal density and then induced under anaerobic and/or low oxygen conditions. Before growth and/or viability are negatively impacted due to stressful induction conditions, cells are returned to oxygenated conditions to recover, after which they are then returned to inducing anaerobic and/or low oxygen conditions for a second time. In some embodiments, these cycles are repeated as needed.

[0946] In some embodiments, growing cultures are spiked once with the chemical and/or nutritional inducer. In some embodiments, growing cultures are spiked twice with the chemical and/or nutritional inducer. In some embodiments, growing cultures are spiked three or more times with the chemical and/or nutritional inducer. In a non-limiting example, cells are first grown under optimal growth conditions up to a certain density, e.g., for 1.5 to 3 hour) to reached an of 0.1 to 10, until the cells are at a density ranging from 1×10\hat{ }8 to 1×10\hat{ }11. Then the chemical inducer, e.g., arabinose or IPTG, is added to the culture. After 3 to 5 hours, an additional dose of the inducer is added to re-initiate the induction. Spiking can be repeated as needed.

[0947] In some embodiments, phasing or cycling changes in temperature in the culture. In another embodiment, adjustment of temperature may be used to improve the activity of a payload. For example, lowering the temperature during culture may improve the proper folding of the payload. In such instances, cells are first grown at a temperature optimal for growth (e.g., 37 C). In some embodiments, the cells are then induced, e.g., by a chemical inducer, to express the payload. Concurrently or after a set amount of induction time, the temperature in the media is lowered, e.g., between 25 and 35 C, to allow improved folding of the expressed payload.

[0948] In some embodiments, payload(s) are under the control of different inducible promoters, for example two different chemical inducers. In other embodiments, the payload is induced under low oxygen conditions or microaerobic conditions and a second payload is induced by a chemical inducer.

[0949] In one embodiment, expression of one or more payload(s) is under the control of one or more FNR promoter(s) and is induced during cell growth, cell expansion, fermentation, recovery, purification, formulation, and/or manufacture by using phasing or cycling or pulsing or spiking techniques.

[0950] In one embodiment, expression of one or more payload(s), is under the control of one or more FNR promoter(s) and is driven from the same promoter in the form of a multicistronic message through the employment of phasing or cycling or pulsing or spiking techniques. In one embodiment, expression of one or more payload(s), is under the control of one or more FNR promoter(s) and is driven from the same promoter as two or more separate messages through the employment of phasing or cycling or pulsing or spiking techniques. In one embodiment, expression of one or more payload(s), is under the control of one or more FNR promoter(s) and is driven from the one or more different promoters through the employment of phasing or cycling or pulsing or spiking techniques.

[0951] In some embodiments, promoters inducible by arabinose, IPTG, rhamnose, tetracycline, and/or other chemical and/or nutritional inducers can be induced through the employment of phasing or cycling or pulsing or spiking techniques in the presence of the chemical and/or nutritional inducer. In particular, strains may comprise a combination of gene sequence(s), some of which are under control of FNR promoters and others which are under control of promoters induced by chemical and/or nutritional inducers. In some embodiments, strains may comprise one or more payload gene sequence(s) under the control of one or more FNR promoter(s) and one or more payload gene sequence(s) under the control of a one or more promoter(s) which are induced by a one or more chemical and/or nutritional inducer(s), including, but not limited to, arabinose, IPTG, rhamnose, tetracycline, and/or other chemical and/or nutritional inducers described herein or known in the art. In some embodiments, strains may comprise one or more payload gene sequence(s) under the control of one or more FNR promoter(s), and one or more payload gene sequence(s) under the control of a one or more constitutive promoter(s) described herein and are induced through the employment of phasing or cycling or pulsing or spiking techniques. In some embodiments, strains may comprise one or more payload gene sequence(s) under the control of an FNR promoter and one or more payload gene sequence(s) under the control of a one or more thermoregulated promoter(s) described herein, and are induced through the employment of phasing or cycling or pulsing or spiking techniques.

[0952] Any of the strains described herein can be grown through the employment of phasing or cycling or pulsing or spiking techniques. In one embodiment, expression of one or more payload(s) is under the control of one or more promoter(s) regulated by chemical and/or nutritional inducers and is induced during cell growth, cell expansion, fermentation, recovery, purification, formulation, and/or manufacture under anaerobic and/or low oxygen conditions.

[0953] In one embodiment, expression of one or more payload(s), is under the control of one or more promoter(s) regulated by chemical and/or nutritional inducers and is driven from the same promoter in the form of a multicistronic message and which are induced through the employment of phasing or cycling or pulsing or spiking techniques. In one embodiment, expression of one or more payload(s), is under the control of one or more promoter(s) regulated by chemical and/or nutritional inducers and is driven from the same promoter as two or more separate messages and is grown through the employment of phasing or cycling or pulsing or spiking techniques. In one embodiment, expression of one or more payload(s), is under the control of one or more promoter(s) regulated by chemical and/or nutritional inducers and is driven from the one or more different promoters, all of which are induced through the employment of phasing or cycling or pulsing or spiking techniques.

[0954] In one embodiment, strains may comprise a combination of gene sequence(s), some of which are under control of a first inducible promoter and others which are under control of a second inducible promoter, both induced by chemical and/or nutritional inducers, through the employment of phasing or cycling or pulsing or spiking techniques. In one embodiment, strains may comprise a combination of gene sequence(s), some of which are under control of a first inducible promoter and others which are under control of a second inducible promoter, both induced by chemical and/or nutritional inducers through the employment of phasing or cycling or pulsing or spiking techniques. In some embodiments, the strains comprise gene sequence(s) under the control of a a third inducible promoter, e.g., an anaerobic/low oxygen promoter, e.g., FNR promoter. In one embodiment, strains may comprise a combination of gene sequence(s), some of which are under control of a first inducible promoter, e.g., a chemically induced promoter or a low oxygen promoter and others which are under control of a second inducible promoter, e.g. a temperature sensitive promoter. In one embodiment, strains may comprise a combination of gene sequence(s), some of which are under control of a first inducible promoter, e.g., a FNR promoter and others which are under control of a second inducible promoter, e.g. a temperature sensitive promoter. In one embodiment, strains may comprise a combination of gene sequence(s), some of which are under control of a first inducible promoter, e.g., a chemically induced and others which are under control of a second inducible promoter, e.g. a temperature sensitive promoter. In some embodiments, strains may comprise one or more payload gene sequence(s) under the control of an FNR promoter and one or more payload gene sequence(s) under the control of a one or more promoter(s) which are induced by a one or more chemical and/or nutritional inducer(s), including, but not limited to, by arabinose, IPTG, rhamnose, tetracycline, and/or other chemical and/or nutritional inducers described herein or known in the art. Additionally the strains may comprise a construct which is under thermoregulatory control. In some embodiments, the bacteria strains further comprise payload sequence(s) under the control of one or more constitutive promoter(s) active under low oxygen conditions. Any of the strains described in these embodiments may be induced through the employment of phasing or cycling or pulsing or spiking techniques.

[0955] Aerobic Induction of the FNR Promoter

[0956] FNRS24Y is a mutated form of FNR which is more resistant to inactivation by oxygen, and therefore can activate FNR promoters under aerobic conditions (see e.g., Jervis A J The O2 sensitivity of the transcription factor FNR is controlled by Ser24 modulating the kinetics of [4Fe-4S] to [2Fe-2S] conversion, Proc Natl Acad Sci USA. 2009 Mar. 24; 106(12):4659-64, the contents of which is herein incorporated by reference in its entirety). In some embodiments, an oxygen bypass system shown and described in figures and examples is used. In this oxygen bypass system, FNRS24Y is induced by addition of arabinose and then drives the expression of the protein of interest (e.g., one or more anti-cancer effector(s) described herein) by binding and activating the FNR promoter under aerobic conditions. Thus, strains can be grown, produced or manufactured efficiently under aerobic conditions, while being effectively pre-induced and pre-loaded, as the system takes advantage of the strong FNR promoter resulting in of high levels of expression of the protein of interest. This system does not interfere with or compromise in vivo activation, since the mutated FNRS24Y is no longer expressed in the absence of arabinose, and wild type FNR then binds to the FNR promoter and drives expression of the protein of interest, e.g., one or more anti-cancer effector(s) described herein.

[0957] In some embodiments, FNRS24Y is expressed during aerobic culture growth and induces a gene of interest. In other embodiments described herein, a second payload expression can also be induced aerobically, e.g., by arabinose. In a non-limiting example, a protein of interest and FNRS24Y can in some embodiments be induced simultaneously, e.g., from an arabinose inducible promoter. In some embodiments, FNRS24Y and the protein of interest are transcribed as a bicistronic message whose expression is driven by an arabinose promoter. In some embodiments, FNRS24Y is knocked into the arabinose operon, allowing expression to be driven from the endogenous Para promoter.

[0958] In some embodiments, a LacI promoter and IPTG induction are used in this system (in lieu of Para and arabinose induction). In some embodiments, a rhamnose inducible promoter is used in this system. In some embodiments, a temperature sensitive promoter is used to drive expression of FNRS24Y.

[0959] Secretion

[0960] In any of the embodiments described herein, in which the genetically engineered organism, e.g., engineered bacteria or engineered virus, produces a protein, polypeptide, or peptide, DNA, RNA, small molecule or other molecule intended to be secreted from the microorganism, the engineered microorganism may comprise a secretion mechanism and corresponding gene sequence(s) encoding the secretion system.

[0961] In some embodiments, the genetically engineered bacteria further comprise a native secretion mechanism or non-native secretion mechanism that is capable of secreting the molecule from the bacterial cytoplasm in the extracellular environment. Many bacteria have evolved sophisticated secretion systems to transport substrates across the bacterial cell envelope. Substrates, such as small molecules, proteins, and DNA, may be released into the extracellular space or periplasm (such as the gut lumen or other space), injected into a target cell, or associated with the bacterial membrane.

[0962] In Gram-negative bacteria, secretion machineries may span one or both of the inner and outer membranes. In some embodiments, the genetically engineered bacteria further comprise a non-native double membrane-spanning secretion system. Double membrane-spanning secretion systems include, but are not limited to, the type I secretion system (T1SS), the type II secretion system (T2SS), the type III secretion system (T3SS), the type IV secretion system (T4SS), the type VI secretion system (T6SS), and the resistance-nodulation-division (RND) family of multi-drug efflux pumps (Pugsley 1993; Gerlach et al., 2007; Collinson et al., 2015; Costa et al., 2015; Reeves et al., 2015; WO2014138324A1, incorporated herein by reference). Examples of such secretion systems are shown in figures and examples. Mycobacteria, which have a Gram-negative-like cell envelope, may also encode a type VII secretion system (T7SS) (Stanley et al., 2003). With the exception of the T2SS, double membrane-spanning secretions generally transport substrates from the bacterial cytoplasm directly into the extracellular space or into the target cell. In contrast, the T2SS and secretion systems that span only the outer membrane may use a two-step mechanism, wherein substrates are first translocated to the periplasm by inner membrane-spanning transporters, and then transferred to the outer membrane or secreted into the extracellular space. Outer membrane-spanning secretion systems include, but are not limited to, the type V secretion or autotransporter system or autosecreter system (T5SS), the curli secretion system, and the chaperone-usher pathway for pili assembly (Saier, 2006; Costa et al., 2015).

[0963] In some embodiments in which the one or more proteins of interest or therapeutic proteins are secreted or exported from the microorganism, the engineered microorganism comprises gene sequence(s) that includes a secretion tag. In some embodiments, the one or more proteins of interest or therapeutic proteins include a “secretion tag” of either RNA or peptide origin to direct the one or more proteins of interest or therapeutic proteins to specific secretion systems. For example, a secretion tag for the Type I Hemolysin secretion system is encoded in the C-terminal 53 amino acids of the alpha hemolysin protein (HlyA).

[0964] In some embodiments, a Hemolysin-based Secretion System is used to secrete the molecule of interest, e.g., therapeutic peptide. Type I Secretion systems offer the advantage of translocating their passenger peptide directly from the cytoplasm to the extracellular space, obviating the two-step process of other secretion types. FIG. 57 shows the alpha-hemolysin (HlyA) of uropathogenic Escherichia coli. This pathway uses HlyB, an ATP-binding cassette transporter; HlyD, a membrane fusion protein; and TolC, an outer membrane protein. The assembly of these three proteins forms a channel through both the inner and outer membranes. HlyB inserts into inner membrane to form a pore, HlyD aligns HlyB with TolC (outer membrane pore) thereby forming a channel through inner and outer membrane. Natively, this channel is used to secrete HlyA, however, to secrete the therapeutic peptide of the present disclosure, the secretion signal-containing C-terminal portion of HlyA is fused to the C-terminal portion of a therapeutic peptide (star) to mediate secretion of this peptide. The C-terminal secretion tag can be removed by either an autocatalytic or protease-catalyzed e.g., OmpT cleavage thereby releasing the one or more proteins of interest or therapeutic proteins into the extracellular milieu. In some embodiments the one or more proteins of interest or therapeutic proteins contain expressed as fusion protein with the 53 amino acids of the C termini of alpha-hemolysin (hlyA) of E. coli CFT073 (C terminal secretion tag).

[0965] In some embodiments, a Type V Autotransporter Secretion System is used to secrete the molecule of interest, e.g., therapeutic peptide. The Type V Auto-secretion System utilizes an N-terminal Sec-dependent peptide tag (inner membrane) and C-terminal tag (outer-membrane). This system uses the Sec-system to get from the cytoplasm to the periplasm. The C-terminal tag then inserts into the outer membrane forming a pore through which the “passenger protein” threads through. Due to the simplicity of the machinery and capacity to handle relatively large protein fluxes, the Type V secretion system is attractive for the extracellular production of recombinant proteins. As shown in FIG. 56, a therapeutic peptide (star) can be fused to an N-terminal secretion signal, a linker, and the beta-domain of an autotransporter. The N-terminal, Sec-dependent signal sequence directs the protein to the SecA-YEG machinery which moves the protein across the inner membrane into the periplasm, followed by subsequent cleavage of the signal sequence. The Beta-domain is recruited to the Bam complex (‘Beta-barrel assembly machinery’) where the beta-domain is folded and inserted into the outer membrane as a beta-barrel structure. The therapeutic peptide is threaded through the hollow pore of the beta-barrel structure ahead of the linker sequence. Once across the outer membrane, the passenger is released from the membrane-embedded C-terminal tag by either an autocatalytic, intein-like mechanism (left side of Bam complex) or via a membrane-bound protease (black scissors; right side of Barn complex) (i.e., OmpT). For example, a membrane-associated peptidase to a complimentary protease cut site in the linker. Thus, in some embodiments, the secreted molecule, such as a heterologous protein or peptide comprises an N-terminal secretion signal, a linker, and beta-domain of an autotransporter so as to allow the molecule to be secreted from the bacteria.

[0966] The N-terminal tag is removed by the Sec system. Thus, in some embodiments, the secretion system is able to remove this tag before secreting the one or more proteins of interest or therapeutic proteins, from the engineered bacteria. In the Type V auto-secretion-mediated secretion the N-terminal peptide secretion tag is removed upon translocation of the “passenger” peptide from the cytoplasm into the periplasmic compartment by the native Sec system. Further, once the auto-secretor is translocated across the outer membrane the C-terminal secretion tag can be removed by either an autocatalytic or protease-catalyzed e.g., OmpT cleavage thereby releasing the molecule(s) into the extracellular milieu.

[0967] In some embodiments, the genetically engineered bacteria of the invention comprise a type III or a type III-like secretion system (T3SS) from Shigella, Salmonella, E. coli, Bivrio, Burkholderia, Yersinia, Chlamydia, or Pseudomonas. The traditional T3SS is capable of transporting a protein from the bacterial cytoplasm to the host cytoplasm through a needle complex. In the Type III traditional secretion system, the basal body closely resembles the flagella, however, instead of a “tail”/whip, the traditional T3SS has a syringe to inject the passenger proteins into host cells. The secretion tag is encoded by an N-terminal peptide (lengths vary and there are several different tags, see PCT/US14/020972). The N-terminal tag is not removed from the polypeptides in this secretion system.

[0968] The T3SS may be modified to secrete the molecule from the bacterial cytoplasm, but not inject the molecule into the host cytoplasm. Thus, the molecule is secreted into the gut lumen, tumor microenvironment, or other extracellular space. In some embodiments, the genetically engineered bacteria comprise said modified T3SS and are capable of secreting the molecule of interest from the bacterial cytoplasm. In some embodiments, the secreted molecule, such as a heterologous protein or peptide comprises a type III secretion sequence that allows the molecule of interest to be secreted from the bacteria.

[0969] In the Flagellar modified Type III Secretion, the tag is encoded in 5′untranslated region of the mRNA and thus there is no peptide tag to cleave/remove. This modified system does not contain the “syringe” portion and instead uses the basal body of the flagella structure as the pore to translocate across both membranes and out through the forming flagella. If the fliC/fliD genes (encoding the flagella “tail”/whip) are disrupted the flagella cannot fully form and this promotes overall secretion. In some embodiments, the tail portion can be removed entirely.

[0970] In some embodiments, a flagellar type III secretion pathway is used to secrete the molecule of interest. In some embodiments, an incomplete flagellum is used to secrete a therapeutic peptide of interest by recombinantly fusing the peptide to an N-terminal flagellar secretion signal of a native flagellar component. In this manner, the intracellularly expressed chimeric peptide can be mobilized across the inner and outer membranes into the surrounding host environment.

[0971] For example, a modified flagellar type III secretion apparatus in which untranslated DNA fragment upstream of the gene fliC (encoding flagellin), e.g., a 173-bp region, is fused to the gene encoding the heterologous protein or peptide can be used to secrete polypeptides of interest (See, e.g., Majander et al., Extracellular secretion of polypeptides using a modified Escherichia coli flagellar secretion apparatus. Nat Biotechnol. 2005 April; 23(4):475-81). In some cases, the untranslated region from the fliC loci may not be sufficient to mediate translocation of the passenger peptide through the flagella. Here it may be necessary to extend the N-terminal signal into the amino acid coding sequence of FliC, for example, by using the 173 bp of untranslated region along with the first 20 amino acids of FliC (see, e.g., Duan et al., Secretion of Insulinotropic Proteins by Commensal Bacteria: Rewiring the Gut To Treat Diabetes, Appl. Environ. Microbiol. December 2008 vol. 74 no. 23 7437-7438).

[0972] In alternate embodiments, the genetically engineered bacteria further comprise a non-native single membrane-spanning secretion system. Single membrane-spanning transporters may act as a component of a secretion system, or may export substrates independently. Such transporters include, but are not limited to, ATP-binding cassette translocases, flagellum/virulence-related translocases, conjugation-related translocases, the general secretory system (e.g., the SecYEG complex in E. coli), the accessory secretory system in mycobacteria and several types of Gram-positive bacteria (e.g., Bacillus anthracis, Lactobacillus johnsonii, Corynebacterium glutamicum, Streptococcus gordonii, Staphylococcus aureus), and the twin-arginine translocation (TAT) system (Saier, 2006; Rigel and Braunstein, 2008; Albiniak et al., 2013). It is known that the general secretory and TAT systems can both export substrates with cleavable N-terminal signal peptides into the periplasm, and have been explored in the context of biopharmaceutical production. The TAT system may offer particular advantages, however, in that it is able to transport folded substrates, thus eliminating the potential for premature or incorrect folding. In certain embodiments, the genetically engineered bacteria comprise a TAT or a TAT-like system and are capable of secreting the molecule of interest from the bacterial cytoplasm. One of ordinary skill in the art would appreciate that the secretion systems disclosed herein may be modified to act in different species, strains, and subtypes of bacteria, and/or adapted to deliver different payloads.

[0973] In order to translocate a protein, e.g., therapeutic polypeptide, to the extracellular space, the polypeptide must first be translated intracellularly, mobilized across the inner membrane and finally mobilized across the outer membrane. Many effector proteins (e.g., therapeutic polypeptides)—particularly those of eukaryotic origin—contain disulphide bonds to stabilize the tertiary and quaternary structures. While these bonds are capable of correctly forming in the oxidizing periplasmic compartment with the help of periplasmic chaperones, in order to translocate the polypeptide across the outer membrane the disulphide bonds must be reduced and the protein unfolded again.

[0974] One way to secrete properly folded proteins in gram-negative bacteria—particularly those requiring disulphide bonds—is to target the reducing-environment periplasm in conjunction with a destabilizing outer membrane. In this manner the protein is mobilized into the oxidizing environment and allowed to fold properly. In contrast to orchestrated extracellular secretion systems, the protein is then able to escape the periplasmic space in a correctly folded form by membrane leakage. These “leaky” gram-negative mutants are therefore capable of secreting bioactive, properly disulphide-bonded polypeptides. In some embodiments, the genetically engineered bacteria have a “leaky” or de-stabilized outer membrane. Destabilizing the bacterial outer membrane to induce leakiness can be accomplished by deleting or mutagenizing genes responsible for tethering the outer membrane to the rigid peptidoglycan skeleton, including for example, lpp, ompC, ompA, ompF, tolA, tolB, pal, degS, degP, and nlpl. Lpp is the most abundant polypeptide in the bacterial cell existing at ˜500,000 copies per cell and functions as the primary ‘staple’ of the bacterial cell wall to the peptidoglycan. 1. Silhavy, T. J., Kahne, D. & Walker, S. The bacterial cell envelope. Cold Spring Harb Perspect Biol 2, a000414 (2010). TolA-PAL and OmpA complexes function similarly to Lpp and are other deletion targets to generate a leaky phenotype. Additionally, leaky phenotypes have been observed when periplasmic proteases are inactivated. The periplasm is very densely packed with protein and therefore encode several periplasmic proteins to facilitate protein turnover. Removal of periplasmic proteases such as degS, degP or nlpl can induce leaky phenotypes by promoting an excessive build-up of periplasmic protein. Mutation of the proteases can also preserve the effector polypeptide by preventing targeted degradation by these proteases. Moreover, a combination of these mutations may synergistically enhance the leaky phenotype of the cell without major sacrifices in cell viability. Thus, in some embodiments, the engineered bacteria have one or more deleted or mutated membrane genes. In some embodiments, the engineered bacteria have a deleted or mutated lpp gene. In some embodiments, the engineered bacteria have one or more deleted or mutated gene(s), selected from ompA, ompA, and ompF genes. In some embodiments, the engineered bacteria have one or more deleted or mutated gene(s), selected from tolA, tolB, and pal genes. in some embodiments, the engineered bacteria have one or more deleted or mutated periplasmic protease genes. In some embodiments, the engineered bacteria have one or more deleted or mutated periplasmic protease genes selected from degS, degP, and nlpl. In some embodiments, the engineered bacteria have one or more deleted or mutated gene(s), selected from lpp, ompA, ompF, tolA, tolB, pal, degS, degP, and nlpl genes.

[0975] To minimize disturbances to cell viability, the leaky phenotype can be made inducible by placing one or more membrane or periplasmic protease genes, e.g., selected from lpp, ompA, ompF, tolA, tolB, pal, degS, degP, and nlpl, under the control of an inducible promoter. For example, expression of lpp or other cell wall stability protein or periplasmic protease can be repressed in conditions where the therapeutic polypeptide needs to be delivered (secreted). For instance, under inducing conditions a transcriptional repressor protein or a designed antisense RNA can be expressed which reduces transcription or translation of a target membrane or periplasmic protease gene. Conversely, overexpression of certain peptides can result in a destabilized phenotype, e.g., overexpression of colicins or the third topological domain of TolA, wherein peptide overexpression can be induced in conditions in which the therapeutic polypeptide needs to be delivered (secreted). These sorts of strategies would decouple the fragile, leaky phenotypes from biomass production. Thus, in some embodiments, the engineered bacteria have one or more membrane and/or periplasmic protease genes under the control of an inducible promoter.

[0976] Table 30 and Table 31A below lists secretion systems for Gram positive bacteria and Gram negative bacteria.

TABLE 30
Secretion systems for gram positive bacteria

| Bacterial Strain | Relevant Secretion System |
|---|---|
| C. novyi-NT (Gram+) | Sec pathway |
| | Twin- arginine (TAT) pathway |
| C. butryicum (Gram+) | Sec pathway |
| | Twin- arginine (TAT) pathway |
| Listeria monocytogenes (Gram+) | Sec pathway |
| | Twin- arginine (TAT) pathway |

TABLE 31A
Secretion Systems for Gram negative bacteria
Protein secretary pathways (SP) in gram-
negative bacteria and their descendants

| | | | | | | | |
|---|---|---|---|---|---|---|---|
| | | | | | | # | |
| Type | | | | | | Proteins/ | Energy |
| (Abbreviation) | Name | TC#² | Bacteria | Archaea | Eukarya | System | Source |

IMPS - Gram-negative bacterial inner membrane
channel-forming translocases

| | | | | | | | |
|---|---|---|---|---|---|---|---|
| ABC | ATP binding | 3.A.1 | + | + | + | 3-4 | ATP |
| (SIP) | cassette | | | | | | |
| | translocase | | | | | | |
| SEC | General | 3.A.5 | + | + | + | ~12 | GTP OR |
| (IISP) | secretory | | | | | | ATP + |
| | translocase | | | | | | PMF |
| Fla/Path | Flagellum/ | 3.A.6 | + | − | − | >10 | ATP |
| (IIISP) | virulence- | | | | | | |
| | related | | | | | | |
| | translocase | | | | | | |
| Conj | Conjugation- | 3.A.7 | + | − | − | >10 | ATP |
| (IVSP) | related | | | | | | |
| | translocase | | | | | | |
| Tat | Twin-arginine | 2.A.64 | + | + | + | 2-4 | PMF |
| (IISP) | targeting | | | | (chloroplasts) | | |
| | translocase | | | | | | |
| Oxa1 | Cytochrome | 2.A.9 | + | + | + | 1 | None or |
| (YidC) | oxidase | | | | (mitochondria | | PMF |
| | biogenesis | | | | chloroplasts) | | |
| | family | | | | | | |
| MscL | Large | 1.A.22 | + | + | + | 1 | None |
| | conductance | | | | | | |
| | mechanosensitive | | | | | | |
| | channel family | | | | | | |
| Holins | Holin | 1.E.1•21 | + | − | − | 1 | None |
| | functional | | | | | | |
| | superfamily | | | | | | |

Eukaryotic Organelles

| | | | | | | | |
|---|---|---|---|---|---|---|---|
| MPT | Mitochondrial | 3.A.B | − | − | + | >20 | ATP |
| | protein | | | | (mitochondrial) | | |
| | translocase | | | | | | |
| CEPT | Chloroplast | 3.A.9 | (+) | − | + | ≥3 | GTP |
| | envelope | | | | (chloroplasts) | | |
| | protein | | | | | | |
| | translocase | | | | | | |
| Bcl-2 | Eukaryotic | 1.A.21 | − | − | + | 1? | None |
| | Bcl-2 family | | | | | | |
| | (programmed | | | | | | |
| | cell death) | | | | | | |

Gram-negative bacterial outer membrane
channel-forming translocases

| | | | | | | | |
|---|---|---|---|---|---|---|---|
| MTB | Main | 3.A.15 | +^{b} | − | − | ~14 | ATP; |
| (IISP) | terminal | | | | | | PMF |
| | branch of the | | | | | | |
| | general | | | | | | |
| | secretory | | | | | | |
| | translocase | | | | | | |
| FUP AT-1 | Fimbrial | 1.B.11 | +^{b} | − | − | 1 | None |
| | usher protein | 1.B.12 | +^{b} | | − | 1 | None |
| | Autotransporter-1 | | | | | | |
| AT-2 OMF | Autotransporter-2 | 1.B.40 | +^{b} | − | − | 1 | None |
| (ISP) | | 1.B.17 | +^{b} | | +(?) | 1 | None |
| TPS | | 1.B.20 | + | − | + | 1 | None |
| Secretin | | 1.B.22 | +^{b} | | − | 1 | None |
| (IISP and | | | | | | | |
| IISP) | | | | | | | |
| OmpIP | Outer | 1.B.33 | + | − | + | ≥4 | None? |
| | membrane | | | | (mitochondria; | | |
| | insertion | | | | chloroplasts) | | |
| | porin | | | | | | |

[0977] The above tables for gram positive and gram negative bacteria list secretion systems that can be used to secrete polypeptides and other molecules from the engineered bacteria, which are reviewed in Milton H. Saier, Jr. Microbe/Volume 1, Number 9, 2006 “Protein Secretion Systems in Gram-Negative Bacteria Gram-negative bacteria possess many protein secretion-membrane insertion systems that apparently evolved independently”, the contents of which is herein incorporated by reference in its entirety.

[0978] In some embodiments, the genetically engineered bacterial comprise a native or non-native secretion system described herein for the secretion of a molecule, e.g., a cytokine, antibody (e.g., scFv), metabolic enzyme, e.g., kynureninase, an others described herein.

TABLE 31B
Polypeptide Sequences of
exemplary secretion tags

| Description | Sequence |
|---|---|
| PhoA | MKQSTIALALLPLLFTPVTKA |
| SEQ ID NO: 1500 | |
| PhoA | KQSTIALALLPLLFTPVTKA |
| SEQ ID NO: 1501 | |
| OmpF | MMKRNILAVIVPALLVAGTANA |
| SEQ ID NO: 1502 | |
| cvaC | MRTLTLNELDSVSGG |
| SEQ ID NO: 1503 | |
| TorA | MNNNDLFQASRRRFLAQLGGLTVAGMLGTSLLT |
| SEQ ID NO: 1504 | PRRATAAQAA |
| fdnG | MDVSRRQFFKICAGGMAGTTVAALGFAPKQALA |
| SEQ ID NO: 1505 | |
| dmsA | MKTKIPDAVLAAEVSRRGLVKTTAIGGLAMASS |
| SEQ ID NO: 1506 | ALTLPFSRIAHA |
| PelB | KYLLPTAAAGLLLLAAQPAMA |
| SEQ ID NO: 1507 | |
| HlyA secretion | LNPLINEISKIISAAGNFDVKEERAAASLLQLS |
| signal | GNASDFSYGRNSITLTASA |
| SEQ ID NO: 1508 | |
| HlyA secretion | CTTAATCCATTAATTAATGAAATCAGCAAAAT |
| signal | CATTTCAGCTGCAGGTAATTTTGATGTTAAAG |
| SEQ ID NO: 1509 | AGGAAAGAGCTGCAGCTTCTTTATTGCAGTTG |
| | ATCCGGTAATGCCAGTGATTTTTCATATGGCG |
| | GAACTCAATAACTTTGACAGCATCAGCATAA. |

TABLE 31C
Additionals secretion tag sequences (native to E coli.)

| Description | Sequences |
|---|---|
| ECOLIN_05715 Secretion signal | MKRHLNTSYRLVWNHITGAFVVASELARARGKRAGVA |
| SEQ ID NO: 1511 | VALSLAAATSLPALA |
| ECOLIN_16495 Secretion signal | MFWRDMTLSVWRKKTTGLKTKKRLLALVLAAALCSSPV |
| SEQ ID NO: 1512 | WA |
| ECOLIN_19410 Secretion signal | MGYKMNISSLRKAFIFMGAVAALSLVNAQSALA |
| SEQ ID NO: 1513 | |
| ECOLIN_19880 Secretion signal | MNKIFKVIWNPATGSYTVASETAKSRGKKSGRSKLLISAL |
| SEQ ID NO: 1514 | VAGGLLSSFGASA |

[0979] In some embodiments, genetically engineered bacteria comprise a nucleic acid sequence that encodes a polypeptide which is at least about 80%, at least about 85%, at least about 90%, at least about 95%, or at least about 99% homologous to the DNA sequence of SEQ ID NO: 1500, SEQ ID NO: 1501, SEQ ID NO: 1502, SEQ ID NO: 1503, SEQ ID NO: 1504, SEQ ID NO: 1505, SEQ ID NO: 1506, SEQ ID NO: 1507, SEQ ID NO: 1508, SEQ ID NO: 1509, SEQ ID NO: 1511, SEQ ID NO: 1512, SEQ ID NO: 1513, and/or SEQ ID NO: 1514.

[0980] Any secretion tag or secretion system can be combined with any cytokine described herein, and can be used to generate a construct (plasmid based or integrated) which is driven by an directly or indirectly inducible or constitutive promoter described herein. In some embodiments, the secretion system is used in combination with one or more genomic mutations, which leads to the leaky or diffusible outer membrane phenotype (DOM), including but not limited to, lpp, nlP, tolA, PAL.

[0981] In some embodiments, the secretion system is selected from the type III flagellar, modified type III flagellar, type I (e.g., hemolysin system), type II, type IV, type V, type VI, and type VII secretion systems, resistance-nodulation-division (RND) multi-drug efflux pumps, a single membrane secretion system, Sec and, TAT secretion systems.

[0982] Any of the secretion systems described herein may according to the disclosure be employed to secrete the polypeptides of interest. In some embodiments, the therapeutic proteins secreted by the genetically engineered bacteria are modified to increase resistance to proteases, e.g. intestinal proteases.

[0983] In some embodiments, the genetically engineered microorganisms are capable of expressing any one or more of the described circuits in low-oxygen conditions, and/or in the presence of cancer and/or the tumor microenvironment, or tissue specific molecules or metabolites, and/or in the presence of molecules or metabolites associated with inflammation or immune suppression, and/or in the presence of metabolites that may be present in the gut, and/or in the presence of metabolites that may or may not be present in vivo, and may be present in vitro during strain culture, expansion, production and/or manufacture, such as arabinose and others described herein. In some embodiments, the gene sequences(s) are controlled by a promoter inducible by such conditions and/or inducers. In some embodiments, the gene sequences(s) are controlled by a constitutive promoter, as described herein. In some embodiments, the gene sequences(s) are controlled by a constitutive promoter, and are expressed in in vivo conditions and/or in vitro conditions, e.g., during expansion, production and/or manufacture, as described herein.

[0984] In some embodiments, any one or more of the described circuits are present on one or more plasmids (e.g., high copy or low copy) or are integrated into one or more sites in the microorganisms chromosome. Also, in some embodiments, the genetically engineered microorganisms are further capable of expressing any one or more of the described circuits and further comprise one or more of the following: (1) one or more auxotrophies, such as any auxotrophies known in the art and provided herein, e.g., thyA auxotrophy, (2) one or more kill switch circuits, such as any of the kill-switches described herein or otherwise known in the art, (3) one or more antibiotic resistance circuits, (4) one or more transporters for importing biological molecules or substrates, such any of the transporters described herein or otherwise known in the art, (5) one or more secretion circuits, such as any of the secretion circuits described herein and otherwise known in the art, (6) one or more surface display circuits, such as any of the surface display circuits described herein and otherwise known in the art and (7) one or more circuits for the production or degradation of one or more metabolites described herein (8) combinations of one or more of such additional circuits.

[0985] Non-limiting examples of proteins of interest include GLP-2 peptides, GLP-2 analogs, IL-22, vIL-10, hIL-10, monomerized IL-10, IL-27, IL-19, IL-20, IL-24, tryptophan synthesies enzymes, SCFA biosynthesis enzymes, tryptophan catabolic enzymes, including but not limited to IDO, TDO, kynureninase, other tryptophan pathway catabolic enzymes, e.g. in the indole pathway and/or the kynurenine pathway as described herein. These polypeptides may be mutated to increase stability, resistance to protease digestion, and/or activity.

TABLE 32
Comparison of Secretion systems for secretion
of polypeptide from engineered bacteria

| Secretion | | | | |
|---|---|---|---|---|
| System | Tag | Cleavage | Advantages | Other features |
| Modified | mRNA | No | No peptide tag | May not be as |
| Type III | (or N- | cleavage | Endogenous | suited for larger |
| (flagellar) | terminal) | necessary | | proteins |
| | | | | Deletion of |
| | | | | flagellar genes |
| Type V | N- and | Yes | Large proteins | 2-step secretion |
| autotransport | C- | | Endogenous | |
| | terminal | | Cleavable | |
| Type I | C- | No | | Tag; Exogenous |
| | terminal | | | Machinery |
| Diffusible | N- | Yes | Disulfide bond | May affect cell |
| Outer | terminal | | formation | fragility/ |
| Membrane | | | | survivability/ |
| (DOM) | | | | growth/yield |

[0986] In some embodiments, the therapeutic polypeptides of interest are secreted using components of the flagellar type III secretion system. In a non-limiting example, such a therapeutic polypeptide of interest, such as, GLP-2 peptides, GLP-2 analogs, IL-22, vIL-10, hIL-10, monomerized IL-10, IL-27, IL-19, IL-20, IL-24, are secreted via Type I Hemolysin Secretion, is assembled behind a fliC-5′UTR (e.g., 173-bp untranslated region from the fliC loci), and is driven by the native promoter. In other embodiments, the expression of the therapeutic peptide of interested secreted using components of the flagellar type III secretion system is driven by a tet-inducible promoter. In alternate embodiments, an inducible promoter such as oxygen level-dependent promoters (e.g., FNR-inducible promoter), promoters induced by IBD specific molecules or promoters induced by inflammation or an inflammatory response (RNS, ROS promoters), and promoters induced by a metabolite that may or may not be naturally present (e.g., can be exogenously added) in the gut, e.g., arabinose is used. In some embodiments, the therapeutic polypeptide of interest is expressed from a plasmid (e.g., a medium copy plasmid). In some embodiments, the therapeutic polypeptide of interest is expressed from a construct which is integrated into fliC locus (thereby deleting fliC), where it is driven by the native FliC promoter. In some embodiments, an N terminal part of FliC (e.g., the first 20 amino acids of FliC) is included in the construct, to further increase secretion efficiency.

[0987] In some embodiments, the therapeutic polypeptides of interest, e.g., GLP-2 peptides, GLP-2 analogs, IL-22, vIL-10, hIL-10, monomerized IL-10, IL-27, IL-19, IL-20, IL-24, are secreted via Type I Hemolysin Secretion, are secreted using via a diffusible outer membrane (DOM) system. In some embodiments, the therapeutic polypeptide of interest is fused to a N-terminal Sec-dependent secretion signal. Non-limiting examples of such N-terminal Sec-dependent secretion signals include PhoA, OmpF, OmpA, and cvaC. In alternate embodiments, the therapeutic polypeptide of interest is fused to a Tat-dependent secretion signal. Exemplary Tat-dependent tags include TorA, FdnG, and DmsA.

[0988] In certain embodiments, the genetically engineered bacteria comprise deletions or mutations in one or more of the outer membrane and/or periplasmic proteins. Non-limiting examples of such proteins, one or more of which may be deleted or mutated, include lpp, pal, tolA, and/or nlpI. In some embodiments, lpp is deleted or mutated. In some embodiments, pal is deleted or mutated. In some embodiments, tolA is deleted or mutated. In other embodiments, nlpl is deleted or mutated. In yet other embodiments, certain periplasmic proteases are deleted or mutated, e.g., to increase stability of the polypeptide in the periplasm. Non-limiting examples of such proteases include degP and ompT. In some embodiments, degP is deleted or mutated. In some embodiments, ompT is deleted or mutated. In some embodiments, degP and ompT are deleted or mutated.

[0989] In some embodiments, the therapeutic polypeptides of interest, e.g., GLP-2 peptides, GLP-2 analogs, IL-22, vIL-10, hIL-10, monomerized IL-10, IL-27, IL-19, IL-20, IL-24, are secreted via Type I Hemolysin Secretion, are secreted via a Type V Auto-secreter (pic Protein) Secretion. In some embodiments, the therapeutic protein of interest is expressed as a fusion protein with the native Nissle auto-secreter E. coli_01635 (where the original passenger protein is replaced with the therapeutic polypeptides of interest.

[0990] In some embodiments, the therapeutic polypeptides of interest, e.g., GLP-2 peptides, GLP-2 analogs, IL-22, vIL-10, hIL-10, monomerized IL-10, IL-27, IL-19, IL-20, IL-24, are secreted via Type I Hemolysin Secretion, are secreted via Type 1 Hemolysin Secretion. In one embodiment, therapeutic polypeptide of interest is expressed as fusion protein with the 53 amino acids of the C terminus of alpha-hemolysin (hlyA) of E. coli CFT073.

### Essential Genes and Auxotrophs

[0991] As used herein, the term “essential gene” refers to a gene which is necessary to for cell growth and/or survival. Bacterial essential genes are well known to one of ordinary skill in the art, and can be identified by directed deletion of genes and/or random mutagenesis and screening (see, e.g., Zhang and Lin, 2009, DEG 5.0, a database of essential genes in both prokaryotes and eukaryotes, Nucl. Acids Res., 37:D455-D458 and Gerdes et al., Essential genes on metabolic maps, Curr. Opin. Biotechnol., 17(5):448-456, the entire contents of each of which are expressly incorporated herein by reference).

[0992] An “essential gene” may be dependent on the circumstances and environment in which an organism lives. For example, a mutation of, modification of, or excision of an essential gene may result in the genetically engineered bacteria of the disclosure becoming an auxotroph. An auxotrophic modification is intended to cause bacteria to die in the absence of an exogenously added nutrient essential for survival or growth because they lack the gene(s) necessary to produce that essential nutrient.

[0993] An auxotrophic modification is intended to cause bacteria to die in the absence of an exogenously added nutrient essential for survival or growth because they lack the gene(s) necessary to produce that essential nutrient. In some embodiments, any of the genetically engineered bacteria described herein also comprise a deletion or mutation in a gene required for cell survival and/or growth. In one embodiment, the essential gene is a DNA synthesis gene, for example, thyA. In another embodiment, the essential gene is a cell wall synthesis gene, for example, dapA. In yet another embodiment, the essential gene is an amino acid gene, for example, serA or MetA. Any gene required for cell survival and/or growth may be targeted, including but not limited to, cysE, glnA, ilvD, leuB, lysA, serA, metA, glyA, hisB, ilvA, pheA, proA, thrC, trpC, tyrA, thyA, uraA, dapA, dapB, dapD, dapE, dapF, flhD, metB, metC, proAB, and thi1, as long as the corresponding wild-type gene product is not produced in the bacteria.

[0994] Table 33 lists depicts exemplary bacterial genes which may be disrupted or deleted to produce an auxotrophic strain. These include, but are not limited to, genes required for oligonucleotide synthesis, amino acid synthesis, and cell wall synthesis.

TABLE 33
Non-limiting Examples of Bacterial Genes
Useful for Generation of an Auxotroph

| Amino Acid | Oligonucleotide | Cell Wall |
|---|---|---|
| cysE | thyA | dapA |
| glnA | uraA | dapB |
| ilvD | | dapD |
| leuB | | dapE |
| lysA | | dapF |
| serA | | |
| metA | | |
| glyA | | |
| hisB | | |
| ilvA | | |
| pheA | | |
| proA | | |
| thrC | | |
| trpC | | |
| tyrA | | |

[0995] Table 34 shows the survival of various amino acid auxotrophs in the mouse gut, as detected 24 hrs and 48 hrs post-gavage. These auxotrophs were generated using BW25113, a non-Nissle strain of E. coli.

TABLE 34
Survival of amino acid auxotrophs in the mouse gut

| Gene | AA Auxotroph | Pre-Gavage | 24 hours | 48 hours |
|---|---|---|---|---|
| argA | Arginine | Present | Present | Absent |
| cysE | Cysteine | Present | Present | Absent |
| glnA | Glutamine | Present | Present | Absent |
| glyA | Glycine | Present | Present | Absent |
| hisB | Histidine | Present | Present | Present |
| ilvA | Isoleucine | Present | Present | Absent |
| leuB | Leucine | Present | Present | Absent |
| lysA | Lysine | Present | Present | Absent |
| metA | Methionine | Present | Present | Present |
| pheA | Phenylalanine | Present | Present | Present |
| proA | Proline | Present | Present | Absent |
| serA | Serine | Present | Present | Present |
| thrC | Threonine | Present | Present | Present |
| trpC | Tryptophan | Present | Present | Present |
| tyrA | Tyrosine | Present | Present | Present |
| ilvD | Valine/Isoleucine/ | Present | Present | Absent |
| | Leucine | | | |
| thyA | Thiamine | Present | Absent | Absent |
| uraA | Uracil | Present | Absent | Absent |
| flhD | FlhD | Present | Present | Present |

[0996] For example, thymine is a nucleic acid that is required for bacterial cell growth; in its absence, bacteria undergo cell death. The thyA gene encodes thimidylate synthetase, an enzyme that catalyzes the first step in thymine synthesis by converting dUMP to dTMP (Sat et al., 2003). In some embodiments, the bacterial cell of the disclosure is a thyA auxotroph in which the thyA gene is deleted and/or replaced with an unrelated gene. A thyA auxotroph can grow only when sufficient amounts of thymine are present, e.g., by adding thymine to growth media in vitro, or in the presence of high thymine levels found naturally in the human gut in vivo. In some embodiments, the bacterial cell of the disclosure is auxotrophic in a gene that is complemented when the bacterium is present in the mammalian gut. Without sufficient amounts of thymine, the thyA auxotroph dies. In some embodiments, the auxotrophic modification is used to ensure that the bacterial cell does not survive in the absence of the auxotrophic gene product (e.g., outside of the gut).

[0997] Diaminopimelic acid (DAP) is an amino acid synthetized within the lysine biosynthetic pathway and is required for bacterial cell wall growth (Meadow et al., 1959; Clarkson et al., 1971). In some embodiments, any of the genetically engineered bacteria described herein is a dapD auxotroph in which dapD is deleted and/or replaced with an unrelated gene. A dapD auxotroph can grow only when sufficient amounts of DAP are present, e.g., by adding DAP to growth media in vitro. Without sufficient amounts of DAP, the dapD auxotroph dies. In some embodiments, the auxotrophic modification is used to ensure that the bacterial cell does not survive in the absence of the auxotrophic gene product (e.g., outside of the gut).

[0998] In other embodiments, the genetically engineered bacterium of the present disclosure is a uraA auxotroph in which uraA is deleted and/or replaced with an unrelated gene. The uraA gene codes for UraA, a membrane-bound transporter that facilitates the uptake and subsequent metabolism of the pyrimidine uracil (Andersen et al., 1995). A uraA auxotroph can grow only when sufficient amounts of uracil are present, e.g., by adding uracil to growth media in vitro. Without sufficient amounts of uracil, the uraA auxotroph dies. In some embodiments, auxotrophic modifications are used to ensure that the bacteria do not survive in the absence of the auxotrophic gene product (e.g., outside of the gut).

[0999] In complex communities, it is possible for bacteria to share DNA. In very rare circumstances, an auxotrophic bacterial strain may receive DNA from a non-auxotrophic strain, which repairs the genomic deletion and permanently rescues the auxotroph. Therefore, engineering a bacterial strain with more than one auxotroph may greatly decrease the probability that DNA transfer will occur enough times to rescue the auxotrophy. In some embodiments, the genetically engineered bacteria of the invention comprise a deletion or mutation in two or more genes required for cell survival and/or growth.

[1000] Other examples of essential genes include, but are not limited to yhbV, yagG, hemB, secD, secF, ribD, ribE, thiL, dxs, ispA, dnaX, adk, hemH, lpxH, cysS, fold, rplT, infC, thrS, nadE, gapA, yeaZ, aspS, argS, pgsA, yefM, metG, folE, yejM, gyrA, nrdA, nrdB, folC, accD, fabB, gltX, ligA, zipA, dapE, dapA, der, hisS, ispG, suhB, tadA, acpS, era, mec, ftsB, eno, pyrG, chpR, lgt, fbaA, pgk, yqgD, metK, yqgF, plsC, ygiT, pare, ribB, cca, ygjD, tdcF, yraL, yihA, ftsN, murl, murB, birA, secE, nusG, rplJ, rplL, rpoB, rpoC, ubiA, plsB, lexA, dnaB, ssb, alsK, groS, psd, orn, yjeE, rpsR, chpS, ppa, valS, yjgP, yjgQ, dnaC, ribF, lspA, ispH, dapB, folA, imp, yabQ, ftsL, ftsI, murE, murF, mraY, murD, ftsW, murG, murC, ftsQ, ftsA, ftsZ, lpxC, secM, secA, can, folK, hemL, yadR, dapD, map, rpsB, infB, nusA, ftsH, obgE, rpmA, rplU, ispB, murA, yrbB, yrbK, yhbN, rpsl, rplM, degS, mreD, mreC, mreB, accB, accC, yrdC, def, fmt, rplQ, rpoA, rpsD, rpsK, rpsM, entD, mrdB, mrdA, nadD, hlepB, rpoE, pssA, yfiO, rplS, trmD, rpsP, ffli, grpE, yfjB, csrA, ispF, ispD, rplW, rplD, rplC, rpsJ, fusA, rpsG, rpsL, trpS, yrfF, asd, rpoH, ftsX, ftsE, ftsY, frr, dxr, ispU, rfaK, kdtA, coaD, rpmB, dfp, dut, gmk, spot, gyrB, dnaN, dnaA, rpmH, rnpA, yidC, tnaB, glmS, glmU, wzyE, hemD, hemC, yigP, ubiB, ubiD, hemG, secY, rplO, rpmD, rpsE, rplR, rplF, rpsH, rpsN, rplE, rplX, rplN, rpsQ, rpmC, rplP, rpsC, rplV, rpsS, rplB, cdsA, yaeL, yaeT, lpxD, fabZ, lpxA, lpxB, dnaE, accA, tilS, proS, yafF, tsf, pyrH, olA, rlpB, leuS, Int, ginS, fldA, cydA, infA, cydC, ftsK, lolA, serS, rpsA, msbA, lpxK, kdsB, mukF, mukE, mukB, asnS, fabA, mviN, me, yceQ, fabD, fabG, acpP, tmk, holB, lolC, lolD, lolE, purB, ymfK, minE, mind, pth, rsA, ispE, lolB, hemA, prfA, prmC, kdsA, topA, ribA, fabl, racR, dicA, ydfB, tyrS, ribC, ydiL, pheT, pheS, yhhQ, bcsB, glyQ, yibJ, and gpsA. Other essential genes are known to those of ordinary skill in the art.

[1001] In some embodiments, the genetically engineered bacterium of the present disclosure is a synthetic ligand-dependent essential gene (SLiDE) bacterial cell. SLiDE bacterial cells are synthetic auxotrophs with a mutation in one or more essential genes that only grow in the presence of a particular ligand (see Lopez and Anderson “Synthetic Auxotrophs with Ligand-Dependent Essential Genes for a BL21 (DE3 Biosafety Strain,” ACS Synthetic Biology (2015) DOI: 10.1021/acssynbio.5b00085, the entire contents of which are expressly incorporated herein by reference).

[1002] In some embodiments, the SLiDE bacterial cell comprises a mutation in an essential gene. In some embodiments, the essential gene is selected from the group consisting of pheS, dnaN, tyrS, metG, and adk. In some embodiments, the essential gene is dnaN comprising one or more of the following mutations: H191N, R240C, I317S, F319V, L340T, V347I, and S345C. In some embodiments, the essential gene is dnaN comprising the mutations H191N, R240C, I317S, F319V, L340T, V347I, and S345C. In some embodiments, the essential gene is pheS comprising one or more of the following mutations: F125G, P183T, P184A, R186A, and I188L. In some embodiments, the essential gene is pheS comprising the mutations F125G, P183T, P184A, R186A, and I188L. In some embodiments, the essential gene is tyrS comprising one or more of the following mutations: L36V, C38A and F40G. In some embodiments, the essential gene is tyrS comprising the mutations L36V, C38A and F40G. In some embodiments, the essential gene is metG comprising one or more of the following mutations: E45Q, N47R, I49G, and A51C. In some embodiments, the essential gene is metG comprising the mutations E45Q, N47R, I49G, and A51C. In some embodiments, the essential gene is adk comprising one or more of the following mutations: I4L, L5I and L6G. In some embodiments, the essential gene is adk comprising the mutations I4L, L5I and L6G.

[1003] In some embodiments, the genetically engineered bacterium is complemented by a ligand. In some embodiments, the ligand is selected from the group consisting of benzothiazole, indole, 2-aminobenzothiazole, indole-3-butyric acid, indole-3-acetic acid, and L-histidine methyl ester. For example, bacterial cells comprising mutations in metG (E45Q, N47R, I49G, and A51C) are complemented by benzothiazole, indole, 2-aminobenzothiazole, indole-3-butyric acid, indole-3-acetic acid or L-histidine methyl ester. Bacterial cells comprising mutations in dnaN (H191N, R240C, I317S, F319V, L340T, V347I, and S345C) are complemented by benzothiazole, indole or 2-aminobenzothiazole. Bacterial cells comprising mutations in pheS (F125G, P183T, P184A, R186A, and I188L) are complemented by benzothiazole or 2-aminobenzothiazole. Bacterial cells comprising mutations in tyrS (L36V, C38A, and F40G) are complemented by benzothiazole or 2-aminobenzothiazole. Bacterial cells comprising mutations in adk (I4L, L5I and L6G) are complemented by benzothiazole or indole.

[1004] In some embodiments, the genetically engineered bacterium comprises more than one mutant essential gene that renders it auxotrophic to a ligand. In some embodiments, the bacterial cell comprises mutations in two essential genes. For example, in some embodiments, the bacterial cell comprises mutations in tyrS (L36V, C38A, and F40G) and metG (E45Q, N47R, I49G, and A51C). In other embodiments, the bacterial cell comprises mutations in three essential genes. For example, in some embodiments, the bacterial cell comprises mutations in tyrS (L36V, C38A, and F40G), metG (E45Q, N47R, I49G, and A51C), and pheS (F125G, P183T, P184A, R186A, and I188L).

[1005] In some embodiments, the genetically engineered bacterium is a conditional auxotroph whose essential gene(s) is replaced using the arabinose system shown in FIG. 60.

[1006] In some embodiments, the genetically engineered bacterium of the disclosure is an auxotroph and also comprises kill-switch circuitry, such as any of the kill-switch components and systems described herein. For example, the genetically engineered bacteria may comprise a deletion or mutation in an essential gene required for cell survival and/or growth, for example, in a DNA synthesis gene, for example, thyA, cell wall synthesis gene, for example, dapA and/or an amino acid gene, for example, serA or MetA and may also comprise a toxin gene that is regulated by one or more transcriptional activators that are expressed in response to an environmental condition(s) and/or signal(s) (such as the described arabinose system) or regulated by one or more recombinases that are expressed upon sensing an exogenous environmental condition(s) and/or signal(s) (such as the recombinase systems described herein). Other embodiments are described in Wright et al., “GeneGuard: A Modular Plasmid System Designed for Biosafety,” ACS Synthetic Biology (2015) 4: 307-16, the entire contents of which are expressly incorporated herein by reference). In some embodiments, the genetically engineered bacterium of the disclosure is an auxotroph and also comprises kill-switch circuitry, such as any of the kill-switch components and systems described herein, as well as another biosecurity system, such a conditional origin of replication (Wright et al., 2015). In other embodiments, auxotrophic modifications may also be used to screen for mutant bacteria that produce the anti-inflammatory or gut barrier enhancer molecule.

[1007] Genetic Regulatory Circuits

[1008] In some embodiments, the genetically engineered bacteria comprise multi-layered genetic regulatory circuits for expressing the constructs described herein (see, e.g., U.S. Provisional Application No. 62/184,811 and PCT/US2016/39434, both of which are incorporated herein by reference in their entireties). The genetic regulatory circuits are useful to screen for mutant bacteria that produce an anti-inflammation and/or gut barrier enhancer molecule or rescue an auxotroph. In certain embodiments, the invention provides methods for selecting genetically engineered bacteria that produce one or more genes of interest.

[1009] In some embodiments, the invention provides genetically engineered bacteria comprising a gene or gene cassette for producing a therapeutic molecule (e.g., butyrate) and a T7 polymerase-regulated genetic regulatory circuit. For example, the genetically engineered bacteria comprise a first gene encoding a T7 polymerase, wherein the first gene is operably linked to a FNR-responsive promoter; a second gene or gene cassette for producing a therapeutic molecule (e.g., butyrate), wherein the second gene or gene cassette is operably linked to a T7 promoter that is induced by the T7 polymerase; and a third gene encoding an inhibitory factor, lysY, that is capable of inhibiting the T7 polymerase. In the presence of oxygen, FNR does not bind the FNR-responsive promoter, and the therapeutic molecule (e.g., butyrate) is not expressed. LysY is expressed constitutively (P-lac constitutive) and further inhibits T7 polymerase. In the absence of oxygen, FNR dimerizes and binds to the FNR-responsive promoter, T7 polymerase is expressed at a level sufficient to overcome lysY inhibition, and the therapeutic molecule (e.g., butyrate) is expressed. In some embodiments, the lysY gene is operably linked to an additional FNR binding site. In the absence of oxygen, FNR dimerizes to activate T7 polymerase expression as described above, and also inhibits lysY expression.

[1010] In some embodiments, the invention provides genetically engineered bacteria comprising a gene or gene cassette for producing a therapeutic molecule (e.g., butyrate) and a protease-regulated genetic regulatory circuit. For example, the genetically engineered bacteria comprise a first gene encoding an mf-lon protease, wherein the first gene is operably linked to a FNR-responsive promoter; a second gene or gene cassette for producing a therapeutic molecule operably linked to a Tet regulatory region (TetO); and a third gene encoding an mf-lon degradation signal linked to a Tet repressor (TetR), wherein the TetR is capable of binding to the Tet regulatory region and repressing expression of the second gene or gene cassette. The mf-lon protease is capable of recognizing the mf-ion degradation signal and degrading the TetR. In the presence of oxygen, FNR does not bind the FNR-responsive promoter, the repressor is not degraded, and the therapeutic molecule is not expressed. In the absence of oxygen, FNR dimerizes and binds the FNR-responsive promoter, thereby inducing expression of the mf-lon protease. The mf-lon protease recognizes the mf-lon degradation signal and degrades the TetR, and the therapeutic molecule is expressed.

[1011] In some embodiments, the invention provides genetically engineered bacteria comprising a gene or gene cassette for producing a therapeutic molecule and a repressor-regulated genetic regulatory circuit. For example, the genetically engineered bacteria comprise a first gene encoding a first repressor, wherein the first gene is operably linked to a FNR-responsive promoter; a second gene or gene cassette for producing a therapeutic molecule operably linked to a first regulatory region comprising a constitutive promoter; and a third gene encoding a second repressor, wherein the second repressor is capable of binding to the first regulatory region and repressing expression of the second gene or gene cassette. The third gene is operably linked to a second regulatory region comprising a constitutive promoter, wherein the first repressor is capable of binding to the second regulatory region and inhibiting expression of the second repressor. In the presence of oxygen, FNR does not bind the FNR-responsive promoter, the first repressor is not expressed, the second repressor is expressed, and the therapeutic molecule is not expressed. In the absence of oxygen, FNR dimerizes and binds the FNR-responsive promoter, the first repressor is expressed, the second repressor is not expressed, and the therapeutic molecule is expressed.

[1012] Examples of repressors useful in these embodiments include, but are not limited to, ArgR, TetR, ArsR, AscG, LacI, CscR, DeoR, DgoR, FruR, GalR, GatR, CI, LexA, RafR, QacR, and PtxS (US20030166191).

[1013] In some embodiments, the invention provides genetically engineered bacteria comprising a gene or gene cassette for producing a therapeutic molecule and a regulatory RNA-regulated genetic regulatory circuit. For example, the genetically engineered bacteria comprise a first gene encoding a regulatory RNA, wherein the first gene is operably linked to a FNR-responsive promoter, and a second gene or gene cassette for producing a therapeutic molecule. The second gene or gene cassette is operably linked to a constitutive promoter and further linked to a nucleotide sequence capable of producing an mRNA hairpin that inhibits translation of the therapeutic molecule. The regulatory RNA is capable of eliminating the mRNA hairpin and inducing translation via the ribosomal binding site. In the presence of oxygen, FNR does not bind the FNR-responsive promoter, the regulatory RNA is not expressed, and the mRNA hairpin prevents the therapeutic molecule from being translated. In the absence of oxygen, FNR dimerizes and binds the FNR-responsive promoter, the regulatory RNA is expressed, the mRNA hairpin is eliminated, and the therapeutic molecule is expressed.

[1014] In some embodiments, the invention provides genetically engineered bacteria comprising a gene or gene cassette for producing a therapeutic molecule and a CRISPR-regulated genetic regulatory circuit. For example, the genetically engineered bacteria comprise a Cas9 protein; a first gene encoding a CRISPR guide RNA, wherein the first gene is operably linked to a FNR-responsive promoter; a second gene or gene cassette for producing a therapeutic molecule, wherein the second gene or gene cassette is operably linked to a regulatory region comprising a constitutive promoter; and a third gene encoding a repressor operably linked to a constitutive promoter, wherein the repressor is capable of binding to the regulatory region and repressing expression of the second gene or gene cassette. The third gene is further linked to a CRISPR target sequence that is capable of binding to the CRISPR guide RNA, wherein said binding to the CRISPR guide RNA induces cleavage by the Cas9 protein and inhibits expression of the repressor. In the presence of oxygen, FNR does not bind the FNR-responsive promoter, the guide RNA is not expressed, the repressor is expressed, and the therapeutic molecule is not expressed. In the absence of oxygen, FNR dimerizes and binds the FNR-responsive promoter, the guide RNA is expressed, the repressor is not expressed, and the therapeutic molecule is expressed.

[1015] In some embodiments, the invention provides genetically engineered bacteria comprising a gene or gene cassette for producing a therapeutic molecule and a recombinase-regulated genetic regulatory circuit. For example, the genetically engineered bacteria comprise a first gene encoding a recombinase, wherein the first gene is operably linked to a FNR-responsive promoter, and a second gene or gene cassette for producing a therapeutic molecule operably linked to a constitutive promoter. The second gene or gene cassette is inverted in orientation (3′ to 5′) and flanked by recombinase binding sites, and the recombinase is capable of binding to the recombinase binding sites to induce expression of the second gene or gene cassette by reverting its orientation (5′ to 3′). In the presence of oxygen, FNR does not bind the FNR-responsive promoter, the recombinase is not expressed, the gene or gene cassette remains in the 3′ to 5′ orientation, and no functional therapeutic molecule is produced. In the absence of oxygen, FNR dimerizes and binds the FNR-responsive promoter, the recombinase is expressed, the gene or gene cassette is reverted to the 5′ to 3′ orientation, and a functional therapeutic molecule is produced.

[1016] In some embodiments, the invention provides genetically engineered bacteria comprising a gene or gene cassette for producing a therapeutic molecule and a polymerase- and recombinase-regulated genetic regulatory circuit. For example, the genetically engineered bacteria comprise a first gene encoding a recombinase, wherein the first gene is operably linked to a FNR-responsive promoter; a second gene or gene cassette for producing a therapeutic molecule operably linked to a T7 promoter; a third gene encoding a T7 polymerase, wherein the T7 polymerase is capable of binding to the T7 promoter and inducing expression of the therapeutic molecule. The third gene encoding the T7 polymerase is inverted in orientation (3′ to 5′) and flanked by recombinase binding sites, and the recombinase is capable of binding to the recombinase binding sites to induce expression of the T7 polymerase gene by reverting its orientation (5′ to 3′). In the presence of oxygen, FNR does not bind the FNR-responsive promoter, the recombinase is not expressed, the T7 polymerase gene remains in the 3′ to 5′ orientation, and the therapeutic molecule is not expressed. In the absence of oxygen, FNR dimerizes and binds the FNR-responsive promoter, the recombinase is expressed, the T7 polymerase gene is reverted to the 5′ to 3′ orientation, and the therapeutic molecule is expressed.

[1017] Synthetic gene circuits expressed on plasmids may function well in the short term but lose ability and/or function in the long term (Danino et al., 2015). In some embodiments, the genetically engineered bacteria comprise stable circuits for expressing genes of interest over prolonged periods. In some embodiments, the genetically engineered bacteria are capable of producing a therapeutic molecule and further comprise a toxin-anti-toxin system that simultaneously produces a toxin (hok) and a short-lived anti-toxin (sok), wherein loss of the plasmid causes the cell to be killed by the long-lived toxin (Danino et al., 2015). In some embodiments, the genetically engineered bacteria further comprise alp7 from B. subtilis plasmid pL20 and produces filaments that are capable of pushing plasmids to the poles of the cells in order to ensure equal segregation during cell division (Danino et al., 2015).

[1018] Host-Plasmid Mutual Dependency

[1019] In some embodiments, the genetically engineered bacteria of the invention also comprise a plasmid that has been modified to create a host-plasmid mutual dependency. In certain embodiments, the mutually dependent host-plasmid platform is GeneGuard (Wright et al., 2015). In some embodiments, the GeneGuard plasmid comprises (i) a conditional origin of replication, in which the requisite replication initiator protein is provided in trans; (ii) an auxotrophic modification that is rescued by the host via genomic translocation and is also compatible for use in rich media; and/or (iii) a nucleic acid sequence which encodes a broad-spectrum toxin. The toxin gene may be used to select against plasmid spread by making the plasmid DNA itself disadvantageous for strains not expressing the anti-toxin (e.g., a wild-type bacterium). In some embodiments, the GeneGuard plasmid is stable for at least 100 generations without antibiotic selection. In some embodiments, the GeneGuard plasmid does not disrupt growth of the host. The GeneGuard plasmid is used to greatly reduce unintentional plasmid propagation in the genetically engineered bacteria of the invention.

[1020] The mutually dependent host-plasmid platform may be used alone or in combination with other biosafety mechanisms, such as those described herein (e.g., kill switches, auxotrophies). In some embodiments, the genetically engineered bacteria comprise a GeneGuard plasmid. In other embodiments, the genetically engineered bacteria comprise a GeneGuard plasmid and/or one or more kill switches. In other embodiments, the genetically engineered bacteria comprise a GeneGuard plasmid and/or one or more auxotrophies. In still other embodiments, the genetically engineered bacteria comprise a GeneGuard plasmid, one or more kill switches, and/or one or more auxotrophies.

[1021] Synthetic gene circuits express on plasmids may function well in the short term but lose ability and/or function in the long term (Danino et al., 2015). In some embodiments, the genetically engineered bacteria comprise stable circuits for expressing genes of interest over prolonged periods. In some embodiments, the genetically engineered bacteria are capable of producing an anti-inflammation and/or gut enhancer molecule and further comprise a toxin-anti-toxin system that simultaneously produces a toxin (hok) and a short-lived anti-toxin (sok), wherein loss of the plasmid causes the cell to be killed by the long-lived toxin (Danino et al., 2015; as shown in the figures and examples). In some embodiments, the genetically engineered bacteria further comprise alp7 from B. subtilis plasmid pL20 and produces filaments that are capable of pushing plasmids to the poles of the cells in order to ensure equal segregation during cell division (Danino et al., 2015).

[1022] Kill Switch

[1023] In some embodiments, the genetically engineered bacteria of the invention also comprise a kill switch (see, e.g., U.S. Provisional Application Nos. 62/183,935, 62/263,329, and 62/277,654, each of which is incorporated herein by reference in their entireties). The kill switch is intended to actively kill genetically engineered bacteria in response to external stimuli. As opposed to an auxotrophic mutation where bacteria die because they lack an essential nutrient for survival, the kill switch is triggered by a particular factor in the environment that induces the production of toxic molecules within the microbe that cause cell death.

[1024] Bacteria comprising kill switches have been engineered for in vitro research purposes, e.g., to limit the spread of a biofuel-producing microorganism outside of a laboratory environment. Bacteria engineered for in vivo administration to treat a disease may also be programmed to die at a specific time after the expression and delivery of a heterologous gene or genes, for example, an anti-inflammation and/or gut barrier enhancer molecule, or after the subject has experienced the therapeutic effect. For example, in some embodiments, the kill switch is activated to kill the bacteria after a period of time following expression of the anti-inflammation and/or gut barrier enhancer molecule, e.g., GLP-2. In some embodiments, the kill switch is activated in a delayed fashion following expression of the anti-inflammation and/or gut barrier enhancer molecule. Alternatively, the bacteria may be engineered to die after the bacterium has spread outside of a disease site. Specifically, it may be useful to prevent long-term colonization of subjects by the microorganism, spread of the microorganism outside the area of interest (for example, outside the gut) within the subject, or spread of the microorganism outside of the subject into the environment (for example, spread to the environment through the stool of the subject). Examples of such toxins that can be used in kill-switches include, but are not limited to, bacteriocins, lysins, and other molecules that cause cell death by lysing cell membranes, degrading cellular DNA, or other mechanisms. Such toxins can be used individually or in combination. The switches that control their production can be based on, for example, transcriptional activation (toggle switches; see, e.g., Gardner et al., 2000), translation (riboregulators), or DNA recombination (recombinase-based switches), and can sense environmental stimuli such as anaerobiosis or reactive oxygen species. These switches can be activated by a single environmental factor or may require several activators in AND, OR, NAND and NOR logic configurations to induce cell death. For example, an AND riboregulator switch is activated by tetracycline, isopropyl β-D-1-thiogalactopyranoside (IPTG), and arabinose to induce the expression of lysins, which permeabilize the cell membrane and kill the cell. IPTG induces the expression of the endolysin and holin mRNAs, which are then derepressed by the addition of arabinose and tetracycline. All three inducers must be present to cause cell death. Examples of kill switches are known in the art (Callura et al., 2010).

[1025] Kill-switches can be designed such that a toxin is produced in response to an environmental condition or external signal (e.g., the bacteria is killed in response to an external cue) or, alternatively designed such that a toxin is produced once an environmental condition no longer exists or an external signal is ceased.

[1026] Thus, in some embodiments, the genetically engineered bacteria of the disclosure are further programmed to die after sensing an exogenous environmental signal, for example, in low-oxygen conditions, in the presence of ROS, or in the presence of RNS. In some embodiments, the genetically engineered bacteria of the present disclosure comprise one or more genes encoding one or more recombinase(s), whose expression is induced in response to an environmental condition or signal and causes one or more recombination events that ultimately leads to the expression of a toxin which kills the cell. In some embodiments, the at least one recombination event is the flipping of an inverted heterologous gene encoding a bacterial toxin which is then constitutively expressed after it is flipped by the first recombinase. In one embodiment, constitutive expression of the bacterial toxin kills the genetically engineered bacterium. In these types of kill-switch systems once the engineered bacterial cell senses the exogenous environmental condition and expresses the heterologous gene of interest, the recombinant bacterial cell is no longer viable.

[1027] In another embodiment in which the genetically engineered bacteria of the present disclosure express one or more recombinase(s) in response to an environmental condition or signal causing at least one recombination event, the genetically engineered bacterium further expresses a heterologous gene encoding an anti-toxin in response to an exogenous environmental condition or signal. In one embodiment, the at least one recombination event is flipping of an inverted heterologous gene encoding a bacterial toxin by a first recombinase. In one embodiment, the inverted heterologous gene encoding the bacterial toxin is located between a first forward recombinase recognition sequence and a first reverse recombinase recognition sequence. In one embodiment, the heterologous gene encoding the bacterial toxin is constitutively expressed after it is flipped by the first recombinase. In one embodiment, the anti-toxin inhibits the activity of the toxin, thereby delaying death of the genetically engineered bacterium. In one embodiment, the genetically engineered bacterium is killed by the bacterial toxin when the heterologous gene encoding the anti-toxin is no longer expressed when the exogenous environmental condition is no longer present.

[1028] In another embodiment, the at least one recombination event is flipping of an inverted heterologous gene encoding a second recombinase by a first recombinase, followed by the flipping of an inverted heterologous gene encoding a bacterial toxin by the second recombinase. In one embodiment, the inverted heterologous gene encoding the second recombinase is located between a first forward recombinase recognition sequence and a first reverse recombinase recognition sequence. In one embodiment, the inverted heterologous gene encoding the bacterial toxin is located between a second forward recombinase recognition sequence and a second reverse recombinase recognition sequence. In one embodiment, the heterologous gene encoding the second recombinase is constitutively expressed after it is flipped by the first recombinase. In one embodiment, the heterologous gene encoding the bacterial toxin is constitutively expressed after it is flipped by the second recombinase. In one embodiment, the genetically engineered bacterium is killed by the bacterial toxin. In one embodiment, the genetically engineered bacterium further expresses a heterologous gene encoding an anti-toxin in response to the exogenous environmental condition. In one embodiment, the anti-toxin inhibits the activity of the toxin when the exogenous environmental condition is present, thereby delaying death of the genetically engineered bacterium. In one embodiment, the genetically engineered bacterium is killed by the bacterial toxin when the heterologous gene encoding the anti-toxin is no longer expressed when the exogenous environmental condition is no longer present.

[1029] In one embodiment, the at least one recombination event is flipping of an inverted heterologous gene encoding a second recombinase by a first recombinase, followed by flipping of an inverted heterologous gene encoding a third recombinase by the second recombinase, followed by flipping of an inverted heterologous gene encoding a bacterial toxin by the third recombinase.

[1030] In one embodiment, the at least one recombination event is flipping of an inverted heterologous gene encoding a first excision enzyme by a first recombinase. In one embodiment, the inverted heterologous gene encoding the first excision enzyme is located between a first forward recombinase recognition sequence and a first reverse recombinase recognition sequence. In one embodiment, the heterologous gene encoding the first excision enzyme is constitutively expressed after it is flipped by the first recombinase. In one embodiment, the first excision enzyme excises a first essential gene. In one embodiment, the programmed recombinant bacterial cell is not viable after the first essential gene is excised.

[1031] In one embodiment, the first recombinase further flips an inverted heterologous gene encoding a second excision enzyme. In one embodiment, the inverted heterologous gene encoding the second excision enzyme is located between a second forward recombinase recognition sequence and a second reverse recombinase recognition sequence. In one embodiment, the heterologous gene encoding the second excision enzyme is constitutively expressed after it is flipped by the first recombinase. In one embodiment, the genetically engineered bacterium dies or is no longer viable when the first essential gene and the second essential gene are both excised. In one embodiment, the genetically engineered bacterium dies or is no longer viable when either the first essential gene is excised or the second essential gene is excised by the first recombinase.

[1032] In one embodiment, the genetically engineered bacterium dies after the at least one recombination event occurs. In another embodiment, the genetically engineered bacterium is no longer viable after the at least one recombination event occurs.

[1033] In any of these embodiment, the recombinase can be a recombinase selected from the group consisting of: BxbI, PhiC31, TP901, BxbI, PhiC31, TP901, HK022, HP1, R4, Int1, Int2, Int3, Int4, Int5, Int6, Int7, Int8, Int9, Int10, Int11, Int12, Int13, Int14, Int15, Int16, Int17, Int18, Int19, Int20, Int21, Int22, Int23, Int24, Int25, Int26, Int27, Int28, Int29, Int30, Int31, Int32, Int33, and Int34, or a biologically active fragment thereof.

[1034] In the above-described kill-switch circuits, a toxin is produced in the presence of an environmental factor or signal. In another aspect of kill-switch circuitry, a toxin may be repressed in the presence of an environmental factor (not produced) and then produced once the environmental condition or external signal is no longer present. Such kill switches are called repression-based kill switches and represent systems in which the bacterial cells are viable only in the presence of an external factor or signal, such as arabinose or other sugar. Exemplary kill switch designs in which the toxin is repressed in the presence of an external factor or signal (and activated once the external signal is removed) is shown in FIGS. 57, 60, 65. The disclosure provides recombinant bacterial cells which express one or more heterologous gene(s) upon sensing arabinose or other sugar in the exogenous environment. In this aspect, the recombinant bacterial cells contain the araC gene, which encodes the AraC transcription factor, as well as one or more genes under the control of the araBAD promoter. In the absence of arabinose, the AraC transcription factor adopts a conformation that represses transcription of genes under the control of the araBAD promoter. In the presence of arabinose, the AraC transcription factor undergoes a conformational change that allows it to bind to and activate the araBAD promoter, which induces expression of the desired gene, for example tetR, which represses expression of a toxin gene. In this embodiment, the toxin gene is repressed in the presence of arabinose or other sugar. In an environment where arabinose is not present, the tetR gene is not activated and the toxin is expressed, thereby killing the bacteria. The arabinose system can also be used to express an essential gene, in which the essential gene is only expressed in the presence of arabinose or other sugar and is not expressed when arabinose or other sugar is absent from the environment.

[1035] Thus, in some embodiments in which one or more heterologous gene(s) are expressed upon sensing arabinose in the exogenous environment, the one or more heterologous genes are directly or indirectly under the control of the araBAD promoter (P_{araBAD}). In some embodiments, the expressed heterologous gene is selected from one or more of the following: a heterologous therapeutic gene, a heterologous gene encoding an anti-toxin, a heterologous gene encoding a repressor protein or polypeptide, for example, a TetR repressor, a heterologous gene encoding an essential protein not found in the bacterial cell, and/or a heterologous encoding a regulatory protein or polypeptide.

[1036] Arabinose inducible promoters are known in the art, including Pₐᵣₐ, P_{araB}, P_{araC}, and P_{araBAD}. In one embodiment, the arabinose inducible promoter is from E. coli. In some embodiments, the P_{araC} promoter and the P_{araBAD} promoter operate as a bidirectional promoter, with the P_{araBAD} promoter controlling expression of a heterologous gene(s) in one direction, and the P_{araC} (in close proximity to, and on the opposite strand from the P_{araBAD} promoter), controlling expression of a heterologous gene(s) in the other direction. In the presence of arabinose, transcription of both heterologous genes from both promoters is induced. However, in the absence of arabinose, transcription of both heterologous genes from both promoters is not induced.

[1037] In one exemplary embodiment of the disclosure, the genetically engineered bacteria of the present disclosure contains a kill-switch having at least the following sequences: a P_{araBAD} promoter operably linked to a heterologous gene encoding a Tetracycline Repressor Protein (TetR), a P_{araC} promoter operably linked to a heterologous gene encoding AraC transcription factor, and a heterologous gene encoding a bacterial toxin operably linked to a promoter which is repressed by the Tetracycline Repressor Protein (P_{TetR}). In the presence of arabinose, the AraC transcription factor activates the P_{araBAD} promoter, which activates transcription of the TetR protein which, in turn, represses transcription of the toxin. In the absence of arabinose, however, AraC suppresses transcription from the the P_{araBAD} promoter and no TetR protein is expressed. In this case, expression of the heterologous toxin gene is activated, and the toxin is expressed. The toxin builds up in the recombinant bacterial cell, and the recombinant bacterial cell is killed. In one embodiment, the araC gene encoding the AraC transcription factor is under the control of a constitutive promoter and is therefore constitutively expressed.

[1038] In one embodiment of the disclosure, the genetically engineered bacterium further comprises an anti-toxin under the control of a constitutive promoter. In this situation, in the presence of arabinose, the toxin is not expressed due to repression by TetR protein, and the anti-toxin protein builds-up in the cell. However, in the absence of arabinose, TetR protein is not expressed, and expression of the toxin is induced. The toxin begins to build-up within the recombinant bacterial cell. The recombinant bacterial cell is no longer viable once the toxin protein is present at either equal or greater amounts than that of the anti-toxin protein in the cell, and the recombinant bacterial cell will be killed by the toxin.

[1039] In another embodiment of the disclosure, the genetically engineered bacterium further comprises an anti-toxin under the control of the P_{araBAD} promoter. In this situation, in the presence of arabinose, TetR and the anti-toxin are expressed, the anti-toxin builds up in the cell, and the toxin is not expressed due to repression by TetR protein. However, in the absence of arabinose, both the TetR protein and the anti-toxin are not expressed, and expression of the toxin is induced. The toxin begins to build-up within the recombinant bacterial cell. The recombinant bacterial cell is no longer viable once the toxin protein is expressed, and the recombinant bacterial cell will be killed by the toxin.

[1040] In another exemplary embodiment of the disclosure, the genetically engineered bacteria of the present disclosure contains a kill-switch having at least the following sequences: a P_{araBAD} promoter operably linked to a heterologous gene encoding an essential polypeptide not found in the recombinant bacterial cell (and required for survival), and a P_{araC} promoter operably linked to a heterologous gene encoding AraC transcription factor. In the presence of arabinose, the AraC transcription factor activates the P_{araBAD} promoter, which activates transcription of the heterologous gene encoding the essential polypeptide, allowing the recombinant bacterial cell to survive. In the absence of arabinose, however, AraC suppresses transcription from the the P_{araBAD} promoter and the essential protein required for survival is not expressed. In this case, the recombinant bacterial cell dies in the absence of arabinose. In some embodiments, the sequence of P_{araBAD} promoter operably linked to a heterologous gene encoding an essential polypeptide not found in the recombinant bacterial cell can be present in the bacterial cell in conjunction with the TetR/toxin kill-switch system described directly above. In some embodiments, the sequence of P_{araBAD} promoter operably linked to a heterologous gene encoding an essential polypeptide not found in the recombinant bacterial cell can be present in the bacterial cell in conjunction with the TetR/toxin/anti-toxin kill-switch system described directly above.

[1041] In yet other embodiments, the bacteria may comprise a plasmid stability system with a plasmid that produces both a short-lived anti-toxin and a long-lived toxin. In this system, the bacterial cell produces equal amounts of toxin and anti-toxin to neutralize the toxin. However, if/when the cell loses the plasmid, the short-lived anti-toxin begins to decay. When the anti-toxin decays completely the cell dies as a result of the longer-lived toxin killing it.

[1042] In some embodiments, the engineered bacteria of the present disclosure further comprise the gene(s) encoding the components of any of the above-described kill-switch circuits.

[1043] In any of the above-described embodiments, the bacterial toxin may be selected from the group consisting of a lysin, Hok, Fst, TisB, LdrD, Kid, SymE, MazF, FlmA, Ibs, XCV2162, dinJ, CcdB, MazF, ParE, YafO, Zeta, hicB, relB, yhaV, yoeB, chpBK, hipA, microcin B, microcin B17, microcin C, microcin C7-C51, microcin J25, microcin ColV, microcin 24, microcin L, microcin D93, microcin L, microcin E492, microcin H47, microcin 147, microcin M, colicin A, colicin E1, colicin K, colicin N, colicin U, colicin B, colicin Ia, colicin Ib, colicin 5, colicin10, colicin S4, colicin Y, colicin E2, colicin E7, colicin E8, colicin E9, colicin E3, colicin E4, colicin E6, colicin E5, colicin D, colicin M, and cloacin DF13, or a biologically active fragment thereof.

[1044] In any of the above-described embodiments, the anti-toxin may be selected from the group consisting of an anti-lysin, Sok, RNAII, IstR, RdlD, Kis, SymR, MazE, FlmB, Sib, ptaRNA1, yafQ, CcdA, MazE, ParD, yafN, Epsilon, HicA, relE, prlF, yefM, chpBI, hipB, MccE, MccE^{CTD}, MccF, Cai, ImmE1, Cki, Cni, Cui, Cbi, Iia, Imm, Cfi, Im10, Csi, Cyi, Im2, Im7, Im8, Im9, Im3, Im4, ImmE6, cloacin immunity protein (Cim), ImmE5, ImmD, and Cmi, or a biologically active fragment thereof.

[1045] In one embodiment, the bacterial toxin is bactericidal to the genetically engineered bacterium. In one embodiment, the bacterial toxin is bacteriostatic to the genetically engineered bacterium.

[1046] In some embodiments, the genetically engineered bacterium provided herein is an auxotroph. In one embodiment, the genetically engineered bacterium is an auxotroph selected from a cysE, glnA, ilvD, leuB, lysA, serA, metA, glyA, hisB, ilvA, pheA, proA, thrC, trpC, tyrA, thyA, uraA, dapA, dapB, dapD, dapE, dapF, flhD, metB, metC, proAB, and thi1 auxotroph. In some embodiments, the engineered bacteria have more than one auxotrophy, for example, they may be a ΔthyA and ΔdapA auxotroph.

[1047] In some embodiments, the genetically engineered bacterium provided herein further comprises a kill-switch circuit, such as any of the kill-switch circuits provided herein. For example, in some embodiments, the genetically engineered bacteria further comprise one or more genes encoding one or more recombinase(s) under the control of an inducible promoter and an inverted toxin sequence. In some embodiments, the genetically engineered bacteria further comprise one or more genes encoding an anti-toxin. In some embodiments, the engineered bacteria further comprise one or more genes encoding one or more recombinase(s) under the control of an inducible promoter and one or more inverted excision genes, wherein the excision gene(s) encode an enzyme that deletes an essential gene. In some embodiments, the genetically engineered bacteria further comprise one or more genes encoding an anti-toxin. In some embodiments, the engineered bacteria further comprise one or more genes encoding a toxin under the control of a promoter having a TetR repressor binding site and a gene encoding the TetR under the control of an inducible promoter that is induced by arabinose, such as P_{araBAD}. In some embodiments, the genetically engineered bacteria further comprise one or more genes encoding an anti-toxin.

[1048] In some embodiments, the genetically engineered bacterium is an auxotroph comprising a therapeutic payload and further comprises a kill-switch circuit, such as any of the kill-switch circuits described herein.

[1049] In some embodiments of the above described genetically engineered bacteria, the gene or gene cassette for producing the anti-inflammation and/or gut barrier enhancer molecule is present on a plasmid in the bacterium and operatively linked on the plasmid to the inducible promoter. In other embodiments, the gene or gene cassette for producing the anti-inflammation and/or gut barrier enhancer molecule is present in the bacterial chromosome and is operatively linked in the chromosome to the inducible promoter.

[1050] Methods of Screening

[1051] Mutagenesis

[1052] In some embodiments, the inducible promoter is operably linked to a detectable product, e.g., GFP, and can be used to screen for mutants. In some embodiments, the inducible promoter is mutagenized, and mutants are selected based upon the level of detectable product, e.g., by flow cytometry, fluorescence-activated cell sorting (FACS) when the detectable product fluoresces. In some embodiments, one or more transcription factor binding sites is mutagenized to increase or decrease binding. In alternate embodiments, the wild-type binding sites are left intact and the remainder of the regulatory region is subjected to mutagenesis. In some embodiments, the mutant promoter is inserted into the genetically engineered bacteria of the invention to increase expression of the anti-inflammation and/or gut barrier enhancer molecule under inducing conditions, as compared to unmutated bacteria of the same subtype under the same conditions. In some embodiments, the inducible promoter and/or corresponding transcription factor is a synthetic, non-naturally occurring sequence.

[1053] In some embodiments, the gene encoding an anti-inflammation and/or gut barrier enhancer molecule is mutated to increase expression and/or stability of said molecule under inducing conditions, as compared to unmutated bacteria of the same subtype under the same conditions. In some embodiments, one or more of the genes in a gene cassette for producing an anti-inflammation and/or gut barrier enhancer molecule is mutated to increase expression of said molecule under inducing conditions, as compared to unmutated bacteria of the same subtype under the same conditions. In some embodiments, the efficacy or activity of any of the importers and exporters for metabolites of interest can be improved through mutations in any of these genes. Mutations increase uptake or export of such metabolites, including but not limited to, tryptophan, e.g., under inducing conditions, as compared to unmutated bacteria of the same subtype under the same conditions. Methods for directed mutation and screening are known in the art.

[1054] Generation of Bacterial Strains with Enhance Ability to Transport Metabolites of Interest

[1055] Due to their ease of culture, short generation times, very high population densities and small genomes, microbes can be evolved to unique phenotypes in abbreviated timescales. Adaptive laboratory evolution (ALE) is the process of passaging microbes under selective pressure to evolve a strain with a preferred phenotype. Most commonly, this is applied to increase utilization of carbon/energy sources or adapting a strain to environmental stresses (e.g., temperature, pH), whereby mutant strains more capable of growth on the carbon substrate or under stress will outcompete the less adapted strains in the population and will eventually come to dominate the population.

[1056] This same process can be extended to any essential metabolite by creating an auxotroph. An auxotroph is a strain incapable of synthesizing an essential metabolite and must therefore have the metabolite provided in the media to grow. In this scenario, by making an auxotroph and passaging it on decreasing amounts of the metabolite, the resulting dominant strains should be more capable of obtaining and incorporating this essential metabolite.

[1057] For example, if the biosynthetic pathway for producing a metabolite of interest is disrupted a strain capable of high-affinity capture of the metabolite of interest can be evolved via ALE. First, the strain is grown in varying concentrations of the auxotrophic metabolite of interest, until a minimum concentration to support growth is established. The strain is then passaged at that concentration, and diluted into lowering concentrations of the metabolite of interest at regular intervals. Over time, cells that are most competitive for the metabolite of interest—at growth-limiting concentrations—will come to dominate the population. These strains will likely have mutations in their metabolite of interest-transporters resulting in increased ability to import the essential and limiting metabolite of interest.

[1058] Similarly, by using an auxotroph that cannot use an upstream metabolite to form the metabolite of interest, a strain can be evolved that not only can more efficiently import the upstream metabolite, but also convert the metabolite into the essential downstream metabolite of interest. These strains will also evolve mutations to increase import of the upstream metabolite, but may also contain mutations which increase expression or reaction kinetics of downstream enzymes, or that reduce competitive substrate utilization pathways.

[1059] A metabolite innate to the microbe can be made essential via mutational auxotrophy and selection applied with growth-limiting supplementation of the endogenous metabolite. However, phenotypes capable of consuming non-native compounds can be evolved by tying their consumption to the production of an essential compound. For example, if a gene from a different organism is isolated which can produce an essential compound or a precursor to an essential compound this gene can be recombinantly introduced and expressed in the heterologous host. This new host strain will now have the ability to synthesize an essential nutrient from a previously non-metabolizable substrate.

[1060] Hereby, a similar ALE process can be applied by creating an auxotroph incapable of converting an immediately downstream metabolite and selecting in growth-limiting amounts of the non-native compound with concurrent expression of the recombinant enzyme. This will result in mutations in the transport of the non-native substrate, expression and activity of the heterologous enzyme and expression and activity of downstream native enzymes. It should be emphasized that the key requirement in this process is the ability to tether the consumption of the non-native metabolite to the production of a metabolite essential to growth.

[1061] Once the basis of the selection mechanism is established and minimum levels of supplementation have been established, the actual ALE experimentation can proceed. Throughout this process several parameters must be vigilantly monitored. It is important that the cultures are maintained in an exponential growth phase and not allowed to reach saturation/stationary phase. This means that growth rates must be check during each passaging and subsequent dilutions adjusted accordingly. If growth rate improves to such a degree that dilutions become large, then the concentration of auxotrophic supplementation should be decreased such that growth rate is slowed, selection pressure is increased and dilutions are not so severe as to heavily bias subpopulations during passaging. In addition, at regular intervals cells should be diluted, grown on solid media and individual clones tested to confirm growth rate phenotypes observed in the ALE cultures.

[1062] Predicting when to halt the stop the ALE experiment also requires vigilance. As the success of directing evolution is tied directly to the number of mutations “screened” throughout the experiment and mutations are generally a function of errors during DNA replication, the cumulative cell divisions (CCD) acts as a proxy for total mutants which have been screened. Previous studies have shown that beneficial phenotypes for growth on different carbon sources can be isolated in about 10^{11.2} CCD¹. This rate can be accelerated by the addition of chemical mutagens to the cultures—such as N-methyl-N-nitro-N-nitrosoguanidine (NTG)—which causes increased DNA replication errors. However, when continued passaging leads to marginal or no improvement in growth rate the population has converged to some fitness maximum and the ALE experiment can be halted.

[1063] At the conclusion of the ALE experiment, the cells should be diluted, isolated on solid media and assayed for growth phenotypes matching that of the culture flask. Best performers from those selected are then prepped for genomic DNA and sent for whole genome sequencing. Sequencing with reveal mutations occurring around the genome capable of providing improved phenotypes, but will also contain silent mutations (those which provide no benefit but do not detract from desired phenotype). In cultures evolved in the presence of NTG or other chemical mutagen, there will be significantly more silent, background mutations. If satisfied with the best performing strain in its current state, the user can proceed to application with that strain. Otherwise the contributing mutations can be deconvoluted from the evolved strain by reintroducing the mutations to the parent strain by genome engineering techniques. See Lee, D.-H., Feist, A. M., Barrett, C. L. & Palsson, B. Ø. Cumulative Number of Cell Divisions as a Meaningful Timescale for Adaptive Laboratory Evolution of Escherichia coli. PLoS ONE 6, e26172 (2011).

[1064] Similar methods can be used to generate E. coli Nissle mutants that consume or import metabolites, including, but not limited to, tryptophan.

[1065] Nucleic Acids

[1066] In some embodiments, the disclosure provides novel nucleic acids for producing butyrate In some embodiments, the nucleic acids comprises gene sequence encoding one or more butyrogenic genes. In some embodiments, the nucleic acids comprises gene sequence encoding one or more butyrogenic gene cassettes. In some embodiments, the nucleic acids comprise one or more butyrogenic genes from Table 2. In some embodiments, the nucleic acids comprises gene sequence encoding one or more butyrogenic genes selected from bcd2, et/B3, etfA3, thiA1, hbd, crt2, pbt, buk, ter, and tesB.

[1067] In some embodiments, the nucleic acid comprises gene sequence encoding a Bcd2 polypeptide. In some embodiments, the nucleic acid comprises a bcd2 gene sequence. In certain embodiments, the nucleic acid comprising the bcd2 gene sequence has at least about 80% identity with SEQ ID NO: 1. In certain embodiments, the nucleic acid comprising the hcd2 gene sequence has at least about 90% identity with SEQ ID NO: 1. In certain embodiments, the nucleic acid comprising the bcd2 gene sequence has at least about 95% identity with SEQ ID NO: 1. In some embodiments, the nucleic acid comprising the bcd2 gene sequence has at least about 85%, 86%, 87%, 88%, 89%, 90%, 91%, 92%, 93%, 94%, 95%, 96%, 97%, 98%, or 99% identity with SEQ ID NO: 1. In some specific embodiments, the nucleic acid comprising the bcd2 gene sequence comprises SEQ ID NO: 1. In other specific embodiments the nucleic acid comprising the bcd2 gene sequence consists of SEQ ID NO: 1.

[1068] In some embodiments, the nucleic acid comprises gene sequence encoding a EtfB3 polypeptide. In some embodiments, the nucleic acid comprises a etfB3 gene sequence. In certain embodiments, the nucleic acid comprising the etfB3 gene sequence has at least about 80% identity with SEQ ID NO: 2. In certain embodiments, the nucleic acid comprising the etfB3 gene sequence has at least about 90% identity with SEQ ID NO: 2. In certain embodiments, the nucleic acid comprising the etfB3 gene sequence has at least about 95% identity with SEQ ID NO: 2. In some embodiments, the nucleic acid comprising the etfB3 gene sequence has at least about 85%, 86%, 87%, 88%, 89%, 90%, 91%, 92%, 93%, 94%, 95%, 96%, 97%, 98%, or 99% identity with SEQ ID NO: 2. In some specific embodiments, the nucleic acid comprising the etfB3 gene sequence comprises SEQ ID NO: 2. In other specific embodiments the nucleic acid comprising the etfB3 gene sequence consists of SEQ ID NO: 2.

[1069] In some embodiments, the nucleic acid comprises gene sequence encoding a EtfA3 polypeptide. In some embodiments, the nucleic acid comprises a etfA3 gene sequence. In certain embodiments, the nucleic acid comprising the etfA3 gene sequence has at least about 80% identity with SEQ ID NO: 3. In certain embodiments, the nucleic acid comprising the etfA3 gene sequence has at least about 90% identity with SEQ ID NO: 3. In certain embodiments, the nucleic acid comprising the etfA3 gene sequence has at least about 95% identity with SEQ ID NO: 3. In some embodiments, the nucleic acid comprising the etfA3 gene sequence has at least about 85%, 86%, 87%, 88%, 89%, 90%, 91%, 92%, 93%, 94%, 95%, 96%, 97%, 98%, or 99% identity with SEQ ID NO: 3. In some specific embodiments, the nucleic acid comprising the etfA3 gene sequence comprises SEQ ID NO: 3. In other specific embodiments the nucleic acid comprising the etfA3 gene sequence consists of SEQ ID NO: 3.

[1070] In some embodiments, the nucleic acid comprises gene sequence encoding a ThiA1 polypeptide. In some embodiments, the nucleic acid comprises a thiA1 gene sequence. In certain embodiments, the nucleic acid comprising the thiA1 gene sequence has at least about 80% identity with SEQ ID NO: 4. In certain embodiments, the nucleic acid comprising the thiA1 gene sequence has at least about 90% identity with SEQ ID NO: 4. In certain embodiments, the nucleic acid comprising the thiA1 gene sequence has at least about 95% identity with SEQ ID NO: 4. In some embodiments, the nucleic acid comprising the thiA1 gene sequence has at least about 85%, 86%, 87%, 88%, 89%, 90%, 91%, 92%, 93%, 94%, 95%, 96%, 97%, 98%, or 99% identity with SEQ ID NO: 4. In some specific embodiments, the nucleic acid comprising the thiA1 gene sequence comprises SEQ ID NO: 4. In other specific embodiments the nucleic acid comprising the thiA1 gene sequence consists of SEQ ID NO: 4.

[1071] In some embodiments, the nucleic acid comprises gene sequence encoding a Hbd polypeptide. In some embodiments, the nucleic acid comprises a hbd gene sequence. In certain embodiments, the nucleic acid comprising the hbd gene sequence has at least about 80% identity with SEQ ID NO: 5. In certain embodiments, the nucleic acid comprising the hbdgene sequence has at least about 90% identity with SEQ ID NO: 5. In certain embodiments, the nucleic acid comprising the hbdgene sequence has at least about 95% identity with SEQ ID NO: 5. In some embodiments, the nucleic acid comprising the hbd gene sequence has at least about 85%, 86%, 87%, 88%, 89%, 90%, 91%, 92%, 93%, 94%, 95%, 96%, 97%, 98%, or 99% identity with SEQ ID NO: 5. In some specific embodiments, the nucleic acid comprising the hbd gene sequence comprises SEQ ID NO: 5. In other specific embodiments the nucleic acid comprising the hbd gene sequence consists of SEQ ID NO: 5.

[1072] In some embodiments, the nucleic acid comprises gene sequence encoding a Crt2 polypeptide. In some embodiments, the nucleic acid comprises a crt2 gene sequence. In certain embodiments, the nucleic acid comprising the crt2 gene sequence has at least about 80% identity with SEQ ID NO: 6. In certain embodiments, the nucleic acid comprising the crt2 gene sequence has at least about 90% identity with SEQ ID NO: 6. In certain embodiments, the nucleic acid comprising the crt2 gene sequence has at least about 95% identity with SEQ ID NO: 6. In some embodiments, the nucleic acid comprising the crt2 gene sequence has at least about 85%, 86%, 87%, 88%, 89%, 90%, 91%, 92%, 93%, 94%, 95%, 96%, 97%, 98%, or 99% identity with SEQ ID NO: 6. In some specific embodiments, the nucleic acid comprising the crt2 gene sequence comprises SEQ ID NO: 6. In other specific embodiments the nucleic acid comprising the crt2 gene sequence consists of SEQ ID NO: 6.

[1073] In some embodiments, the nucleic acid comprises gene sequence encoding a Pbt polypeptide. In some embodiments, the nucleic acid comprises a pbt gene sequence. In certain embodiments, the nucleic acid comprising the pbt gene sequence has at least about 80% identity with SEQ ID NO: 7. In certain embodiments, the nucleic acid comprising the pbt gene sequence has at least about 90% identity with SEQ ID NO: 7. In certain embodiments, the nucleic acid comprising the pbt gene sequence has at least about 95% identity with SEQ ID NO: 7. In some embodiments, the nucleic acid comprising the pbt gene sequence has at least about 85%, 86%, 87%, 88%, 89%, 90%, 91%, 92%, 93%, 94%, 95%, 96%, 97%, 98%, or 99% identity with SEQ ID NO: 7. In some specific embodiments, the nucleic acid comprising the pbt gene sequence comprises SEQ ID NO: 7. In other specific embodiments the nucleic acid comprising the pbt gene sequence consists of SEQ ID NO: 7.

[1074] In some embodiments, the nucleic acid comprises gene sequence encoding a Buk polypeptide. In some embodiments, the nucleic acid comprises a buk gene sequence. In certain embodiments, the nucleic acid comprising the buk gene sequence has at least about 80% identity with SEQ ID NO: 8. In certain embodiments, the nucleic acid comprising the buk gene sequence has at least about 90% identity with SEQ ID NO: 8. In certain embodiments, the nucleic acid comprising the buk gene sequence has at least about 95% identity with SEQ ID NO: 8. In some embodiments, the nucleic acid comprising the buk gene sequence has at least about 85%, 86%, 87%, 88%, 89%, 90%, 91%, 92%, 93%, 94%, 95%, 96%, 97%, 98%, or 99% identity with SEQ ID NO: 8. In some specific embodiments, the nucleic acid comprising the buk gene sequence comprises SEQ ID NO: 8. In other specific embodiments the nucleic acid comprising the buk gene sequence consists of SEQ ID NO: 8.

[1075] In some embodiments, the nucleic acid comprises gene sequence encoding a Ter polypeptide. In some embodiments, the nucleic acid comprises a ter gene sequence. In certain embodiments, the nucleic acid comprising the ter gene sequence has at least about 80% identity with SEQ ID NO: 9. In certain embodiments, the nucleic acid comprising the ter gene sequence has at least about 90% identity with SEQ ID NO: 9. In certain embodiments, the nucleic acid comprising the ter gene sequence has at least about 95% identity with SEQ ID NO: 9. In some embodiments, the nucleic acid comprising the ter gene sequence has at least about 85%, 86%, 87%, 88%, 89%, 90%, 91%, 92%, 93%, 94%, 95%, 96%, 97%, 98%, or 99% identity with SEQ ID NO: 9. In some specific embodiments, the nucleic acid comprising the ter gene sequence comprises SEQ ID NO: 9. In other specific embodiments the nucleic acid comprising the ter gene sequence consists of SEQ ID NO: 9.

[1076] In some embodiments, the nucleic acid comprises gene sequence encoding a TesB polypeptide. In some embodiments, the nucleic acid comprises a tesB gene sequence. In certain embodiments, the nucleic acid comprising the tesB gene sequence has at least about 80% identity with SEQ ID NO: 10. In certain embodiments, the nucleic acid comprising the tesB gene sequence has at least about 90% identity with SEQ ID NO: 10. In certain embodiments, the nucleic acid comprising the tesB gene sequence has at least about 95% identity with SEQ ID NO: 10. In some embodiments, the nucleic acid comprising the tesB gene sequence has at least about 85%, 86%, 87%, 88%, 89%, 90%, 91%, 92%, 93%, 94%, 95%, 96%, 97%, 98%, or 99% identity with SEQ ID NO: 10. In some specific embodiments, the nucleic acid comprising the tesB gene sequence comprises SEQ ID NO: 10. In other specific embodiments the nucleic acid comprising the tesB gene sequence consists of SEQ ID NO: 10.

[1077] In other embodiments, the disclosure provides novel nucleic acids for producing butyrate in which the nucleic acid comprises gene sequence encoding one or more butyrogenic gene cassette(s). In some embodiments, the nucleic acid comprises gene sequence encoding a butyrogenic gene cassette comprising Bcd2, EtfB3, EtfA3, ThiA1, Hbd, Crt2, Pbt, and Buk. In some embodiments, the nucleic acid comprises a butyrogenic gene cassette(s) cassette comprising bcd2, etfB3, etfA3, thiA1, hbd, crt2, pbt, and buk gene sequence. In some embodiments, the nucleic acid comprises gene sequence encoding a butyrogenic gene cassette comprising ThiA1, Hbd, Crt2, Pbt, Buk, and Ter. In some embodiments, the nucleic acid comprises a butyrogenic gene cassette(s) cassette comprising thiA1, hbd, crt2, pbt, buk, and ter gene sequence. In some embodiments, the nucleic acid comprises gene sequence encoding a butyrogenic gene cassette comprising Ter, ThiA1, Hbd, Crt2, and TesB. In some embodiments, the nucleic acid comprises a butyrogenic gene cassette(s) cassette comprising ter, thiA1, hbd, crt2, and tesB gene sequence.

[1078] In any of the nucleic acid embodiments described above and elsewhere herein, the gene sequence encoding one or more polypeptides that produce butyrate is operably linked to an inducible promoter. In said embodiments, the inducible promoter is directly or indirectly induced by exogenous environmental conditions. In any of the nucleic acid embodiments described above and elsewhere herein, the gene sequence encoding one or more polypeptides that produce butyrate is operably linked to an constitutive promoter. In some embodiments, the nucleic acid is expressed under the control of a promoter that is directly or indirectly induced by exogenous environmental conditions. In one embodiment, the nucleic acid is expressed under the control of a promoter that is directly or indirectly induced by low-oxygen or anaerobic conditions, wherein expression of the nucleic acid is activated under low-oxygen or anaerobic environments, such as the environment of the mammalian gut. Inducible promoters and constitutive promoters are described in more detail infra.

[1079] One or more of the nucleic acids encoding butyrate biosynthesis genes may be functionally replaced or modified, e.g., codon optimized.

[1080] Pharmaceutical Compositions and Formulations

[1081] Pharmaceutical compositions comprising the genetically engineered microorganisms of the invention may be used to inhibit inflammatory mechanisms in the gut, restore and tighten gut mucosal barrier function, and/or treat or prevent autoimmunedisorders. Pharmaceutical compositions comprising one or more genetically engineered bacteria, and/or one or more genetically engineered virus, alone or in combination with prophylactic agents, therapeutic agents, and/or pharmaceutically acceptable carriers are provided.

[1082] In certain embodiments, the pharmaceutical composition comprises one species, strain, or subtype of bacteria that are engineered to comprise the genetic modifications described herein, e.g., to produce an anti-inflammation and/or gut barrier enhancer molecule. In alternate embodiments, the pharmaceutical composition comprises two or more species, strains, and/or subtypes of bacteria that are each engineered to comprise the genetic modifications described herein, e.g., to produce an anti-inflammation and/or gut barrier enhancer molecule.

[1083] In certain embodiments, a combination of two or more different genetically engineered microorganisms can be administered at the same time. In some embodiments, the method comprises administering the a subject a combination of two or more genetically engineered microorganisms, a first microorganism which expresses a first payload, and at least a second microorganism which expresses a second payload. In some embodiments, the method comprises compositions comprising a combination of two or more genetically engineered microorganisms, a first microorganisms which expresses a first payload, and at least a second microorganism which expresses a second payload.

[1084] The pharmaceutical compositions described herein may be formulated in a conventional manner using one or more physiologically acceptable carriers comprising excipients and auxiliaries, which facilitate processing of the active ingredients into compositions for pharmaceutical use. Methods of formulating pharmaceutical compositions are known in the art (see, e.g., “Remington's Pharmaceutical Sciences,” Mack Publishing Co., Easton, Pa.). In some embodiments, the pharmaceutical compositions are subjected to tabletting, lyophilizing, direct compression, conventional mixing, dissolving, granulating, levigating, emulsifying, encapsulating, entrapping, or spray drying to form tablets, granulates, nanoparticles, nanocapsules, microcapsules, microtablets, pellets, or powders, which may be enterically coated or uncoated.

[1085] Appropriate formulation depends on the route of administration.

[1086] The genetically engineered microorganisms may be formulated into pharmaceutical compositions in any suitable dosage form (e.g., liquids, capsules, sachet, hard capsules, soft capsules, tablets, enteric coated tablets, suspension powders, granules, or matrix sustained release formations for oral administration) and for any suitable type of administration (e.g., oral, topical, injectable, intravenous, sub-cutaneous, immediate-release, pulsatile-release, delayed-release, or sustained release). Suitable dosage amounts for the genetically engineered bacteria may range from about 105 to 1012 bacteria, e.g., approximately 105 bacteria, approximately 106 bacteria, approximately 107 bacteria, approximately 108 bacteria, approximately 109 bacteria, approximately 1010 bacteria, approximately 1011 bacteria, or approximately 1011 bacteria. The composition may be administered once or more daily, weekly, or monthly. The composition may be administered before, during, or following a meal. In one embodiment, the pharmaceutical composition is administered before the subject eats a meal. In one embodiment, the pharmaceutical composition is administered currently with a meal. In on embodiment, the pharmaceutical composition is administered after the subject eats a meal

[1087] The genetically engineered bacteria or genetically engineered virus may be formulated into pharmaceutical compositions comprising one or more pharmaceutically acceptable carriers, thickeners, diluents, buffers, buffering agents, surface active agents, neutral or cationic lipids, lipid complexes, liposomes, penetration enhancers, carrier compounds, and other pharmaceutically acceptable carriers or agents. For example, the pharmaceutical composition may include, but is not limited to, the addition of calcium bicarbonate, sodium bicarbonate, calcium phosphate, various sugars and types of starch, cellulose derivatives, gelatin, vegetable oils, polyethylene glycols, and surfactants, including, for example, polysorbate 20. In some embodiments, the genetically engineered bacteria of the invention may be formulated in a solution of sodium bicarbonate, e.g., 1 molar solution of sodium bicarbonate (to buffer an acidic cellular environment, such as the stomach, for example). The genetically engineered bacteria may be administered and formulated as neutral or salt forms. Pharmaceutically acceptable salts include those formed with anions such as those derived from hydrochloric, phosphoric, acetic, oxalic, tartaric acids, etc., and those formed with cations such as those derived from sodium, potassium, ammonium, calcium, ferric hydroxides, isopropylamine, triethylamine, 2-ethylamino ethanol, histidine, procaine, etc.

[1088] The genetically engineered microorganisms may be administered intravenously, e.g., by infusion or injection.

[1089] The genetically engineered microorganisms of the disclosure may be administered intrathecally. In some embodiments, the genetically engineered microorganisms of the invention may be administered orally. The genetically engineered microorganisms disclosed herein may be administered topically and formulated in the form of an ointment, cream, transdermal patch, lotion, gel, shampoo, spray, aerosol, solution, emulsion, or other form well known to one of skill in the art. See, e.g., “Remington's Pharmaceutical Sciences,” Mack Publishing Co., Easton, Pa. In an embodiment, for non-sprayable topical dosage forms, viscous to semi-solid or solid forms comprising a carrier or one or more excipients compatible with topical application and having a dynamic viscosity greater than water are employed. Suitable formulations include, but are not limited to, solutions, suspensions, emulsions, creams, ointments, powders, liniments, salves, etc., which may be sterilized or mixed with auxiliary agents (e.g., preservatives, stabilizers, wetting agents, buffers, or salts) for influencing various properties, e.g., osmotic pressure. Other suitable topical dosage forms include sprayable aerosol preparations wherein the active ingredient in combination with a solid or liquid inert carrier, is packaged in a mixture with a pressurized volatile (e.g., a gaseous propellant, such as freon) or in a squeeze bottle. Moisturizers or humectants can also be added to pharmaceutical compositions and dosage forms. Examples of such additional ingredients are well known in the art. In one embodiment, the pharmaceutical composition comprising the recombinant bacteria of the invention may be formulated as a hygiene product. For example, the hygiene product may be an antibacterial formulation, or a fermentation product such as a fermentation broth. Hygiene products may be, for example, shampoos, conditioners, creams, pastes, lotions, and lip balms.

[1090] The genetically engineered microorganisms disclosed herein may be administered orally and formulated as tablets, pills, dragees, capsules, liquids, gels, syrups, slurries, suspensions, etc. Pharmacological compositions for oral use can be made using a solid excipient, optionally grinding the resulting mixture, and processing the mixture of granules, after adding suitable auxiliaries if desired, to obtain tablets or dragee cores. Suitable excipients include, but are not limited to, fillers such as sugars, including lactose, sucrose, mannitol, or sorbitol; cellulose compositions such as maize starch, wheat starch, rice starch, potato starch, gelatin, gum tragacanth, methyl cellulose, hydroxypropylmethyl-cellulose, sodium carbomethylcellulose; and/or physiologically acceptable polymers such as polyvinylpyrrolidone (PVP) or polyethylene glycol (PEG). Disintegrating agents may also be added, such as cross-linked polyvinylpyrrolidone, agar, alginic acid or a salt thereof such as sodium alginate.

[1091] Tablets or capsules can be prepared by conventional means with pharmaceutically acceptable excipients such as binding agents (e.g., pregelatinised maize starch, polyvinylpyrrolidone, hydroxypropyl methylcellulose, carboxymethylcellulose, polyethylene glycol, sucrose, glucose, sorbitol, starch, gum, kaolin, and tragacanth); fillers (e.g., lactose, microcrystalline cellulose, or calcium hydrogen phosphate); lubricants (e.g., calcium, aluminum, zinc, stearic acid, polyethylene glycol, sodium lauryl sulfate, starch, sodium benzoate, L-leucine, magnesium stearate, talc, or silica); disintegrants (e.g., starch, potato starch, sodium starch glycolate, sugars, cellulose derivatives, silica powders); or wetting agents (e.g., sodium lauryl sulphate). The tablets may be coated by methods well known in the art. A coating shell may be present, and common membranes include, but are not limited to, polylactide, polyglycolic acid, polyanhydride, other biodegradable polymers, alginate-polylysine-alginate (APA), alginate-polymethylene-co-guanidine-alginate (A-PMCG-A), hydroymethylacrylate-methyl methacrylate (HEMA-MMA), multilayered HEMA-MMA-MAA, polyacrylonitrilevinylchloride (PAN-PVC), acrylonitrile/sodium methallylsulfonate (AN-69), polyethylene glycol/poly pentamethylcyclopentasiloxane/polydimethylsiloxane (PEG/PD5/PDMS), poly N,N-dimethyl acrylamide (PDMAAm), siliceous encapsulates, cellulose sulphate/sodium alginate/polymethylene-co-guanidine (CS/A/PMCG), cellulose acetate phthalate, calcium alginate, k-carrageenan-locust bean gum gel beads, gellan-xanthan beads, poly(lactide-co-glycolides), carrageenan, starch poly-anhydrides, starch polymethacrylates, polyamino acids, and enteric coating polymers.

[1092] In some embodiments, the genetically engineered microorganisms are enterically coated for release into the gut or a particular region of the gut, for example, the large intestine. The typical pH profile from the stomach to the colon is about 1-4 (stomach), 5.5-6 (duodenum), 7.3-8.0 (ileum), and 5.5-6.5 (colon). In some diseases, the pH profile may be modified. In some embodiments, the coating is degraded in specific pH environments in order to specify the site of release. In some embodiments, at least two coatings are used. In some embodiments, the outside coating and the inside coating are degraded at different pH levels.

[1093] Liquid preparations for oral administration may take the form of solutions, syrups, suspensions, or a dry product for constitution with water or other suitable vehicle before use. Such liquid preparations may be prepared by conventional means with pharmaceutically acceptable agents such as suspending agents (e.g., sorbitol syrup, cellulose derivatives, or hydrogenated edible fats); emulsifying agents (e.g., lecithin or acacia); non-aqueous vehicles (e.g., almond oil, oily esters, ethyl alcohol, or fractionated vegetable oils); and preservatives (e.g., methyl or propyl-p-hydroxybenzoates or sorbic acid). The preparations may also contain buffer salts, flavoring, coloring, and sweetening agents as appropriate. Preparations for oral administration may be suitably formulated for slow release, controlled release, or sustained release of the genetically engineered microorganisms described herein.

[1094] In one embodiment, the genetically engineered microorganisms of the disclosure may be formulated in a composition suitable for administration to pediatric subjects. As is well known in the art, children differ from adults in many aspects, including different rates of gastric emptying, pH, gastrointestinal permeability, etc. (Ivanovska et al., Pediatrics, 134(2):361-372, 2014). Moreover, pediatric formulation acceptability and preferences, such as route of administration and taste attributes, are critical for achieving acceptable pediatric compliance. Thus, in one embodiment, the composition suitable for administration to pediatric subjects may include easy-to-swallow or dissolvable dosage forms, or more palatable compositions, such as compositions with added flavors, sweeteners, or taste blockers. In one embodiment, a composition suitable for administration to pediatric subjects may also be suitable for administration to adults.

[1095] In one embodiment, the composition suitable for administration to pediatric subjects may include a solution, syrup, suspension, elixir, powder for reconstitution as suspension or solution, dispersible/effervescent tablet, chewable tablet, gummy candy, lollipop, freezer pop, troche, chewing gum, oral thin strip, orally disintegrating tablet, sachet, soft gelatin capsule, sprinkle oral powder, or granules. In one embodiment, the composition is a gummy candy, which is made from a gelatin base, giving the candy elasticity, desired chewy consistency, and longer shelf-life. In some embodiments, the gummy candy may also comprise sweeteners or flavors.

[1096] In one embodiment, the composition suitable for administration to pediatric subjects may include a flavor. As used herein, “flavor” is a substance (liquid or solid) that provides a distinct taste and aroma to the formulation. Flavors also help to improve the palatability of the formulation. Flavors include, but are not limited to, strawberry, vanilla, lemon, grape, bubble gum, and cherry.

[1097] In certain embodiments, the genetically engineered microorganisms may be orally administered, for example, with an inert diluent or an assimilable edible carrier. The compound may also be enclosed in a hard or soft shell gelatin capsule, compressed into tablets, or incorporated directly into the subject's diet. For oral therapeutic administration, the compounds may be incorporated with excipients and used in the form of ingestible tablets, buccal tablets, troches, capsules, elixirs, suspensions, syrups, wafers, and the like. To administer a compound by other than parenteral administration, it may be necessary to coat the compound with, or co-administer the compound with, a material to prevent its inactivation.

[1098] In another embodiment, the pharmaceutical composition comprising the recombinant bacteria of the invention may be a comestible product, for example, a food product. In one embodiment, the food product is milk, concentrated milk, fermented milk (yogurt, sour milk, frozen yogurt, lactic acid bacteria-fermented beverages), milk powder, ice cream, cream cheeses, dry cheeses, soybean milk, fermented soybean milk, vegetable-fruit juices, fruit juices, sports drinks, confectionery, candies, infant foods (such as infant cakes), nutritional food products, animal feeds, or dietary supplements. In one embodiment, the food product is a fermented food, such as a fermented dairy product. In one embodiment, the fermented dairy product is yogurt. In another embodiment, the fermented dairy product is cheese, milk, cream, ice cream, milk shake, or kefir. In another embodiment, the recombinant bacteria of the invention are combined in a preparation containing other live bacterial cells intended to serve as probiotics. In another embodiment, the food product is a beverage. In one embodiment, the beverage is a fruit juice-based beverage or a beverage containing plant or herbal extracts. In another embodiment, the food product is a jelly or a pudding. Other food products suitable for administration of the recombinant bacteria of the invention are well known in the art. For example, see U.S. 2015/0359894 and US 2015/0238545, the entire contents of each of which are expressly incorporated herein by reference. In yet another embodiment, the pharmaceutical composition of the invention is injected into, sprayed onto, or sprinkled onto a food product, such as bread, yogurt, or cheese.

[1099] In some embodiments, the composition is formulated for intraintestinal administration, intrajejunal administration, intraduodenal administration, intraileal administration, gastric shunt administration, or intracolic administration, via nanoparticles, nanocapsules, microcapsules, or microtablets, which are enterically coated or uncoated. The pharmaceutical compositions may also be formulated in rectal compositions such as suppositories or retention enemas, using, e.g., conventional suppository bases such as cocoa butter or other glycerides. The compositions may be suspensions, solutions, or emulsions in oily or aqueous vehicles, and may contain suspending, stabilizing and/or dispersing agents.

[1100] The genetically engineered microorganisms described herein may be administered intranasally, formulated in an aerosol form, spray, mist, or in the form of drops, and conveniently delivered in the form of an aerosol spray presentation from pressurized packs or a nebuliser, with the use of a suitable propellant (e.g., dichlorodifluoromethane, trichlorofluoromethane, dichlorotetrafluoroethane, carbon dioxide or other suitable gas). Pressurized aerosol dosage units may be determined by providing a valve to deliver a metered amount. Capsules and cartridges (e.g., of gelatin) for use in an inhaler or insufflator may be formulated containing a powder mix of the compound and a suitable powder base such as lactose or starch.

[1101] The genetically engineered microorganisms may be administered and formulated as depot preparations. Such long acting formulations may be administered by implantation or by injection, including intravenous injection, subcutaneous injection, local injection, direct injection, or infusion. For example, the compositions may be formulated with suitable polymeric or hydrophobic materials (e.g., as an emulsion in an acceptable oil) or ion exchange resins, or as sparingly soluble derivatives (e.g., as a sparingly soluble salt).

[1102] In some embodiments, disclosed herein are pharmaceutically acceptable compositions in single dosage forms. Single dosage forms may be in a liquid or a solid form. Single dosage forms may be administered directly to a patient without modification or may be diluted or reconstituted prior to administration. In certain embodiments, a single dosage form may be administered in bolus form, e.g., single injection, single oral dose, including an oral dose that comprises multiple tablets, capsule, pills, etc. In alternate embodiments, a single dosage form may be administered over a period of time, e.g., by infusion.

[1103] Single dosage forms of the pharmaceutical composition may be prepared by portioning the pharmaceutical composition into smaller aliquots, single dose containers, single dose liquid forms, or single dose solid forms, such as tablets, granulates, nanoparticles, nanocapsules, microcapsules, microtablets, pellets, or powders, which may be enterically coated or uncoated. A single dose in a solid form may be reconstituted by adding liquid, typically sterile water or saline solution, prior to administration to a patient.

[1104] In other embodiments, the composition can be delivered in a controlled release or sustained release system. In one embodiment, a pump may be used to achieve controlled or sustained release. In another embodiment, polymeric materials can be used to achieve controlled or sustained release of the therapies of the present disclosure (see e.g., U.S. Pat. No. 5,989,463). Examples of polymers used in sustained release formulations include, but are not limited to, poly(2-hydroxy ethyl methacrylate), poly(methyl methacrylate), poly(acrylic acid), poly(ethylene-co-vinyl acetate), poly(methacrylic acid), polyglycolides (PLG), polyanhydrides, poly(N-vinyl pyrrolidone), poly(vinyl alcohol), polyacrylamide, poly(ethylene glycol), polylactides (PLA), poly(lactide-co-glycolides) (PLGA), and polyorthoesters. The polymer used in a sustained release formulation may be inert, free of leachable impurities, stable on storage, sterile, and biodegradable. In some embodiments, a controlled or sustained release system can be placed in proximity of the prophylactic or therapeutic target, thus requiring only a fraction of the systemic dose. Any suitable technique known to one of skill in the art may be used.

[1105] Dosage regimens may be adjusted to provide a therapeutic response. Dosing can depend on several factors, including severity and responsiveness of the disease, route of administration, time course of treatment (days to months to years), and time to amelioration of the disease. For example, a single bolus may be administered at one time, several divided doses may be administered over a predetermined period of time, or the dose may be reduced or increased as indicated by the therapeutic situation. The specification for the dosage is dictated by the unique characteristics of the active compound and the particular therapeutic effect to be achieved. Dosage values may vary with the type and severity of the condition to be alleviated. For any particular subject, specific dosage regimens may be adjusted over time according to the individual need and the professional judgment of the treating clinician. Toxicity and therapeutic efficacy of compounds provided herein can be determined by standard pharmaceutical procedures in cell culture or animal models. For example, LD50, ED50, EC50, and IC50 may be determined, and the dose ratio between toxic and therapeutic effects (LD50/ED50) may be calculated as the therapeutic index. Compositions that exhibit toxic side effects may be used, with careful modifications to minimize potential damage to reduce side effects. Dosing may be estimated initially from cell culture assays and animal models. The data obtained from in vitro and in vivo assays and animal studies can be used in formulating a range of dosage for use in humans.

[1106] The ingredients are supplied either separately or mixed together in unit dosage form, for example, as a dry lyophilized powder or water-free concentrate in a hermetically sealed container such as an ampoule or sachet indicating the quantity of active agent. If the mode of administration is by injection, an ampoule of sterile water for injection or saline can be provided so that the ingredients may be mixed prior to administration.

[1107] The pharmaceutical compositions may be packaged in a hermetically sealed container such as an ampoule or sachet indicating the quantity of the agent. In one embodiment, one or more of the pharmaceutical compositions is supplied as a dry sterilized lyophilized powder or water-free concentrate in a hermetically sealed container and can be reconstituted (e.g., with water or saline) to the appropriate concentration for administration to a subject. In an embodiment, one or more of the prophylactic or therapeutic agents or pharmaceutical compositions is supplied as a dry sterile lyophilized powder in a hermetically sealed container stored between 2° C. and 8° C. and administered within 1 hour, within 3 hours, within 5 hours, within 6 hours, within 12 hours, within 24 hours, within 48 hours, within 72 hours, or within one week after being reconstituted. Cryoprotectants can be included for a lyophilized dosage form, principally 0-10% sucrose (optimally 0.5-1.0%). Other suitable cryoprotectants include trehalose and lactose. Other suitable bulking agents include glycine and arginine, either of which can be included at a concentration of 0-0.05%, and polysorbate-80 (optimally included at a concentration of 0.005-0.01%). Additional surfactants include but are not limited to polysorbate 20 and BRIJ surfactants. The pharmaceutical composition may be prepared as an injectable solution and can further comprise an agent useful as an adjuvant, such as those used to increase absorption or dispersion, e.g., hyaluronidase.

[1108] Methods of Treatment

[1109] Another aspect of the invention provides methods of treating autoimmune disorders, diarrheal diseases, IBD, related diseases, and other diseases that benefit from reduced gut inflammation and/or enhanced gut barrier function. In some embodiments, the invention provides for the use of at least one genetically engineered species, strain, or subtype of bacteria described herein for the manufacture of a medicament. In some embodiments, the invention provides for the use of at least one genetically engineered species, strain, or subtype of bacteria described herein for the manufacture of a medicament for treating autoimmune disorders, diarrheal diseases, IBD, related diseases, and other diseases that benefit from reduced gut inflammation and/or enhanced gut barrier function. In some embodiments, the invention provides at least one genetically engineered species, strain, or subtype of bacteria described herein for use in treating autoimmune disorders, diarrheal diseases, IBD, related diseases, and other diseases that benefit from reduced gut inflammation and/or enhanced gut barrier function.

[1110] In some embodiments, the diarrheal disease is selected from the group consisting of acute watery diarrhea, e.g., cholera, acute bloody diarrhea, e.g., dysentery, and persistent diarrhea. In some embodiments, the IBD or related disease is selected from the group consisting of Crohn's disease, ulcerative colitis, collagenous colitis, lymphocytic colitis, diversion colitis, Behcet's disease, intermediate colitis, short bowel syndrome, ulcerative proctitis, proctosigmoiditis, left-sided colitis, pancolitis, and fulminant colitis. In some embodiments, the disease or condition is an autoimmune disorder selected from the group consisting of acute disseminated encephalomyelitis (ADEM), acute necrotizing hemorrhagic leukoencephalitis, Addison's disease, agammaglobulinemia, alopecia areata, amyloidosis, ankylosing spondylitis, anti-GBM/anti-TBM nephritis, antiphospholipid syndrome (APS), autoimmune angioedema, autoimmune aplastic anemia, autoimmune dysautonomia, autoimmune hemolytic anemia, autoimmune hepatitis, autoimmune hyperlipidemia, autoimmune immunodeficiency, autoimmune inner ear disease (AIED), autoimmune myocarditis, autoimmune oophoritis, autoimmune pancreatitis, autoimmune retinopathy, autoimmune thrombocytopenic purpura (ATP), autoimmune thyroid disease, autoimmune urticarial, axonal & neuronal neuropathies, Balo disease, Behcet's disease, bullous pemphigoid, cardiomyopathy, Castleman disease, celiac disease, Chagas disease, chronic inflammatory demyelinating polyneuropathy (CIDP), chronic recurrent multifocal ostomyelitis (CRMO), Churg-Strauss syndrome, cicatricial pemphigoid/benign mucosal pemphigoid, Crohn's disease, Cogan's syndrome, cold agglutinin disease, congenital heart block, Coxsackie myocarditis, CREST disease, essential mixed cryoglobulinemia, demyelinating neuropathies, dermatitis herpetiformis, dermatomyositis, Devic's disease (neuromyelitis optica), discoid lupus, Dressler's syndrome, endometriosis, eosinophilic esophagitis, eosinophilic fasciitis, erythema nodosum, experimental allergic encephalomyelitis, Evans syndrome, fibrosing alveolitis, giant cell arteritis (temporal arteritis), giant cell myocarditis, glomerulonephritis, Goodpasture's syndrome, granulomatosis with polyangiitis (GPA), Graves' disease, Guillain-Barre syndrome, Hashimoto's encephalitis, Hashimoto's thyroiditis, hemolytic anemia, Henoch-Schonlein purpura, herpes gestationis, hypogammaglobulinemia, idiopathic thrombocytopenic purpura (ITP), IgA nephropathy, IgG4-related sclerosing disease, immunoregulatory lipoproteins, inclusion body myositis, interstitial cystitis, juvenile arthritis, juvenile idiopathic arthritis, juvenile myositis, Kawasaki syndrome, Lambert-Eaton syndrome, leukocytoclastic vasculitis, lichen planus, lichen sclerosus, ligneous conjunctivitis, linear IgA disease (LAD), lupus (systemic lupus erythematosus), chronic Lyme disease, Meniere's disease, microscopic polyangiitis, mixed connective tissue disease (MCTD), Mooren's ulcer, Mucha-IIabennann disease, multiple sclerosis, myasthenia gravis, myositis, narcolepsy, neuromyelitis optica (Devic's), neutropenia, ocular cicatricial pemphigoid, optic neuritis, palindromic rheumatism, PANDAS (Pediatric Autoimmune Neuropsychiatric Disorders Associated with Streptococcus), paraneoplastic cerebellar degeneration, paroxysmal nocturnal hemoglobinuria (PNH), Parry Romberg syndrome, Parsonnage-Turner syndrome, pars planitis (peripheral uveitis), pemphigus, peripheral neuropathy, perivenous encephalomyelitis, pernicious anemia, POEMS syndrome, polyarteritis nodosa, type I, II, & III autoimmune polyglandular syndromes, polymyalgia rheumatic, polymyositis, postmyocardial infarction syndrome, postpericardiotomy syndrome, progesterone dermatitis, primary biliary cirrhosis, primary sclerosing cholangitis, psoriasis, psoriatic arthritis, idiopathic pulmonary fibrosis, pyoderma gangrenosum, pure red cell aplasia, Raynaud's phenomenon, reactive arthritis, reflex sympathetic dystrophy, Reiter's syndrome, relapsing polychondritis, restless legs syndrome, retroperitoneal fibrosis, rheumatic fever, rheumatoid arthritis, sarcoidosis, Schmidt syndrome, scleritis, scleroderma, Sjogren's syndrome, sperm & testicular autoimmunity, stiff person syndrome, subacute bacterial endocarditis (SBE), Susac's syndrome, sympathetic ophthalmia, Takayasu's arteritis, temporal arteritis/giant cell arteritis, thrombocytopenic purpura (TTP), Tolosa-Hunt syndrome, transverse myelitis, type 1 diabetes, asthma, ulcerative colitis, undifferentiated connective tissue disease (UCTD), uveitis, vasculitis, vesiculobullous dermatosis, vitiligo, and Wegener's granulomatosis. In some embodiments, the invention provides methods for reducing, ameliorating, or eliminating one or more symptom(s) associated with these diseases, including but not limited to diarrhea, bloody stool, mouth sores, perianal disease, abdominal pain, abdominal cramping, fever, fatigue, weight loss, iron deficiency, anemia, appetite loss, weight loss, anorexia, delayed growth, delayed pubertal development, and inflammation of the skin, eyes, joints, liver, and bile ducts. In some embodiments, the invention provides methods for reducing gut inflammation and/or enhancing gut barrier function, thereby ameliorating or preventing a systemic autoimmune disorder, e.g., asthma (Arrieta et al., 2015).

[1111] The method may comprise preparing a pharmaceutical composition with at least one genetically engineered species, strain, or subtype of bacteria described herein, and administering the pharmaceutical composition to a subject in a therapeutically effective amount. In some embodiments, the genetically engineered bacteria of the invention are administered orally in a liquid suspension. In some embodiments, the genetically engineered bacteria of the invention are lyophilized in a gel cap and administered orally. In some embodiments, the genetically engineered bacteria of the invention are administered via a feeding tube. In some embodiments, the genetically engineered bacteria of the invention are administered rectally, e.g., by enema. In some embodiments, the genetically engineered bacteria of the invention are administered topically, intraintestinally, intrajejunally, intraduodenally, intraileally, and/or intracolically.

[1112] In some embodiments, the genetically engineered viruses are prepared for delivery, taking into consideration the need for efficient delivery and for overcoming the host antiviral immune response. Approaches to evade antiviral response include the administration of different viral serotypes as par of the treatment regimen (serotype switching), formulation, such as polymer coating to mask the virus from antibody recognition and the use of cells as delivery vehicles.

[1113] In another embodiment, the composition can be delivered in a controlled release or sustained release system. In one embodiment, a pump may be used to achieve controlled or sustained release. In another embodiment, polymeric materials can be used to achieve controlled or sustained release of the therapies of the present disclosure (see e.g., U.S. Pat. No. 5,989,463). Examples of polymers used in sustained release formulations include, but are not limited to, poly(2-hydroxy ethyl methacrylate), poly(methyl methacrylate), poly(acrylic acid), poly(ethylene-co-vinyl acetate), poly(methacrylic acid), polyglycolides (PLG), polyanhydrides, poly(N-vinyl pyrrolidone), poly(vinyl alcohol), polyacrylamide, poly(ethylene glycol), polylactides (PLA), poly(lactide-co-glycolides) (PLGA), and polyorthoesters. The polymer used in a sustained release formulation may be inert, free of leachable impurities, stable on storage, sterile, and biodegradable. In some embodiments, a controlled or sustained release system can be placed in proximity of the prophylactic or therapeutic target, thus requiring only a fraction of the systemic dose. Any suitable technique known to one of skill in the art may be used.

[1114] The genetically engineered bacteria of the invention may be administered and formulated as neutral or salt forms. Pharmaceutically acceptable salts include those formed with anions such as those derived from hydrochloric, phosphoric, acetic, oxalic, tartaric acids, etc., and those formed with cations such as those derived from sodium, potassium, ammonium, calcium, ferric hydroxides, isopropylamine, triethylamine, 2-ethylamino ethanol, histidine, procaine, etc.

[1115] In certain embodiments, the pharmaceutical composition described herein is administered to reduce gut inflammation, enhance gut barrier function, and/or treat or prevent an autoimmune disorder in a subject. In some embodiments, the methods of the present disclosure may reduce gut inflammation in a subject by at least about 10%, 20%, 25%, 30%, 40%, 50%, 60%, 70%, 75%, 80%, 85%, 90%, 95%, or more as compared to levels in an untreated or control subject. In some embodiments, the methods of the present disclosure may enhance gut barrier function in a subject by at least about 10%, 20%, 25%, 30%, 40%, 50%, 60%, 70%, 75%, 80%, 85%, 90%, 95%, or more as compared to levels in an untreated or control subject. In some embodiments, changes in inflammation and/or gut barrier function are measured by comparing a subject before and after administration of the pharmaceutical composition. In some embodiments, the method of treating or ameliorating the autoimmune disorder and/or the disease or condition associated with gut inflammation and/or compromised gut barrier function allows one or more symptoms of the disease or condition to improve by at least about 10%, 20%, 30%, 40%, 50%, 60%, 70%, 80%, 90%, 95%, or more.

[1116] In some embodiments, reduction is measured by comparing the levels of inflammation in a subject before and after administration of the pharmaceutical composition. In one embodiment, the levels of inflammation is reduced in the gut of the subject. In one embodiment, gut barrier function is enhanced in the gut of the subject. In another embodiment, levels of inflammation is reduced in the blood of the subject. In another embodiment, the levels of inflammation is reduced in the plasma of the subject. In another embodiment, levels of inflammation is reduced in the brain of the subject.

[1117] In one embodiment, the pharmaceutical composition described herein is administered to reduce levels of inflammation in a subject to normal levels. In another embodiment, the pharmaceutical composition described herein is administered to reduce levels of inflammation in a subject below normal.

[1118] In some embodiments, the method of treating the autoimmune disorder allows one or more symptoms of the condition or disorder to improve by at least about 10%, 20%, 30%, 40%, 50%, 60%, 70%, 80%, 90%, 95%, or more. In some embodiments, the method of treating the disorder, allows one or more symptoms of the condition or disorder to improve by at least about two-fold, three-fold, four-fold, five-fold, six-fold, seven-fold, eight-fold, nine-fold, or ten-fold.

[1119] Before, during, and after the administration of the pharmaceutical composition, gut inflammation and/or barrier function in the subject may be measured in a biological sample, such as blood, serum, plasma, urine, fecal matter, peritoneal fluid, intestinal mucosal scrapings, a sample collected from a tissue, and/or a sample collected from the contents of one or more of the following: the stomach, duodenum, jejunum, ileum, cecum, colon, rectum, and anal canal. In some embodiments, the methods may include administration of the compositions of the invention to enhance gut barrier function and/or to reduce gut inflammation to baseline levels, e.g., levels comparable to those of a healthy control, in a subject. In some embodiments, the methods may include administration of the compositions of the invention to reduce gut inflammation to undetectable levels in a subject, or to less than about 1%, 2%, 5%, 10%, 20%, 25%, 30%, 40%, 50%, 60%, 70%, 75%, or 80% of the subject's levels prior to treatment. In some embodiments, the methods may include administration of the compositions of the invention to enhance gut barrier function in a subject by about 1%, 2%, 5%, 10%, 20%, 25%, 30%, 40%, 50%, 60%, 70%, 75%, 80%, 90%, 100% or more of the subject's levels prior to treatment.

[1120] In certain embodiments, the recombinant bacteria are E. coli Nissle. The recombinant bacteria may be destroyed, e.g., by defense factors in the gut or blood serum (Sonnenborn et al., 2009) or by activation of a kill switch, several hours or days after administration. Thus, the pharmaceutical composition comprising the recombinant bacteria may be re-administered at a therapeutically effective dose and frequency. In alternate embodiments, the recombinant bacteria are not destroyed within hours or days after administration and may propagate and colonize the gut.

[1121] The pharmaceutical composition may be administered alone or in combination with one or more additional therapeutic agents, e.g., corticosteroids, aminosalicylates, anti-inflammatory agents. In some embodiments, the pharmaceutical composition is administered in conjunction with an anti-inflammatory drug (e.g., mesalazine, prednisolone, methylprednisolone, butesonide), an immunosuppressive drug (e.g., azathioprine, 6-mercaptopurine, methotrexate, cyclosporine, tacrolimus), an antibiotic (e.g., metronidazole, ornidazole, clarithromycin, rifaximin, ciprofloxacin, anti-TB), other probiotics, and/or biological agents (e.g., infliximab, adalimumab, certolizumab pegol) (Triantafillidis et al., 2011). An important consideration in the selection of the one or more additional therapeutic agents is that the agent(s) should be compatible with the genetically engineered bacteria of the invention, e.g., the agent(s) must not kill the bacteria In one embodiments, the bacterial cells disclosed herein are administered to a subject once daily. In another embodiment, the bacterial cells disclosed herein are administered to a subject twice daily. In another embodiment, the bacterial cells disclosed herein are administered to a subject in combination with a meal. In another embodiment, the bacterial cells disclosed herein are administered to a subject prior to a meal. In another embodiment, the bacterial cells disclosed herein are administered to a subject after a meal. The dosage of the pharmaceutical composition and the frequency of administration may be selected based on the severity of the symptoms and the progression of the disease. The appropriate therapeutically effective dose and/or frequency of administration can be selected by a treating clinician.

[1122] Treatment In Vivo

[1123] The genetically engineered bacteria of the invention may be evaluated in vivo, e.g., in an animal model. Any suitable animal model of a disease or condition associated with gut inflammation, compromised gut barrier function, and/or an autoimmune disorder may be used (see, e.g., Mizoguchi, 2012). The animal model may be a mouse model of IBD, e.g., a CD45RB^{Hi} T cell transfer model or a dextran sodium sulfate (DSS) model. The animal model may be a mouse model of type 1 diabetes (T1D), and T1D may be induced by treatment with streptozotocin.

[1124] Colitis is characterized by inflammation of the inner lining of the colon, and is one form of IBD. In mice, modeling colitis often involves the aberrant expression of T cells and/or cytokines. One exemplary mouse model of IBD can be generated by sorting CD4+ T cells according to their levels of CD45RB expression, and adoptively transferring CD4+ T cells with high CD45RB expression from normal donor mice into immunodeficient mice. Non-limiting examples of immunodeficient mice that may be used for transfer include severe combined immunodeficient (SCID) mice (Morrissey et al., 1993; Powrie et al., 1993), and recombination activating gene 2 (RAG2)-deficient mice (Corazza et al., 1999). The transfer of CD45RB^{Hi} T cells into immunodeficient mice, e.g., via intravenous or intraperitoneal injection, results in epithelial cell hyperplasia, tissue damage, and severe mononuclear cell infiltration within the colon (Byrne et al., 2005; Dohi et al., 2004; Wei et al., 2005). In some embodiments, the genetically engineered bacteria of the invention may be evaluated in a CD45RB^{Hi} T cell transfer mouse model of IBD.

[1125] Another exemplary animal model of IBD can be generated by supplementing the drinking water of mice with dextran sodium sulfate (DSS) (Martinez et al., 2006; Okayasu et al., 1990; Whittem et al., 2010). Treatment with DSS results in epithelial damage and robust inflammation in the colon lasting several days. Single treatments may be used to model acute injury, or acute injury followed by repair. Mice treated acutely show signs of acute colitis, including bloody stool, rectal bleeding, diarrhea, and weight loss (Okayasu et al., 1990). In contrast, repeat administration cycles of DSS may be used to model chronic inflammatory disease. Mice that develop chronic colitis exhibit signs of colonic mucosal regeneration, such as dysplasia, lymphoid follicle formation, and shortening of the large intestine (Okayasu et al., 1990). In some embodiments, the genetically engineered bacteria of the invention may be evaluated in a DSS mouse model of IBD.

[1126] In some embodiments, the genetically engineered bacteria of the invention is administered to the animal, e.g., by oral gavage, and treatment efficacy is determined, e.g., by endoscopy, colon translucency, fibrin attachment, mucosal and vascular pathology, and/or stool characteristics. In some embodiments, the animal is sacrificed, and tissue samples are collected and analyzed, e.g., colonic sections are fixed and scored for inflammation and ulceration, and/or homogenized and analyzed for myeloperoxidase activity and cytokine levels (e.g., IL-1β, TNF-α, IL-6, IFN-γ and IL-10).

### REFERENCES

[1127] Aboulnaga et al. Effect of an oxygen-tolerant bifurcating butyryl coenzyme A dehydrogenase/electron-transferring flavoprotein complex from Clostridium difficile on butyrate production in Escherichia coli. J Bact. 2013; 195(16):3704-13. PMID: 23772070.
[1128] Ahmad et al. scFv antibody: principles and clinical application. Clin Dev Immunol. 2012; 2012:980250. PMID: 22474489.
[1129] Alavi et al. Treatment of inflammatory bowel disease in a rodent model with the intestinal growth factor glucagon-like peptide-2. J Pediatr Surg. 2000 June; 35(6):847-51. PMID: 10873024.
[1130] Albiniak et al. High-level secretion of a recombinant protein to the culture medium with a Bacillus subtilis twin-arginine translocation system in Escherichia coli. FEBS J. 2013; 280(16):3810-21. PMID: 23745597.
[1131] Altenhoefer et al. The probiotic Escherichia coli strain Nissle 1917 interferes with invasion of human intestinal epithelial cells by different enteroinvasive bacterial pathogens. FEMS Immunol Med Microbiol. 2004 Apr. 9; 40(3):223-9. PMID: 15039098.
[1132] Alvarado et al. Targeting the Broadly Pathogenic Kynurenine Pathway. 2015. Sandeep, ed. Springer International Publishing: Switzerland.
[1133] Appleyard C B, Wallace J L. Reactivation of hapten-induced colitis and its prevention by anti-inflammatory drugs. Am J Physiol. 1995 July; 269(1 Pt 1):G119-25. PMID: 7631788.
[1134] Arai et al. Expression of the nir and nor genes for denitrification of Pseudomonas aeruginosa requires a novel CRP/FNR-related transcriptional regulator, DNR, in addition to ANR. FEBS Lett. 1995 Aug. 28; 371(1):73-6. PMID: 7664887.
[1135] Arrieta et al. Early infancy microbial and metabolic alterations affect risk of childhood asthma. Sci Transl Med. 2015 Sep. 30; 7(307):307ra152. PMID: 26424567.
[1136] Arthur et al. Intestinal inflammation targets cancer-inducing activity of the microbiota. Science. 2012 Oct. 5; 338(6103):120-3. PMID: 22903521.
[1137] Atarashi et al. Induction of colonic regulatory T cells by indigenous Clostridium species. Science. 2011 Jan. 21; 331(6015):337-41. PMID: 21205640.
[1138] Boirivant et al. Oxazolone colitis: a murine model of T helper cell type 2 colitis treatable with antibodies to interleukin 4. J Exp Med. 1998 Nov. 16; 188(10):1929-39. PMID: 9815270.
[1139] Bramhall et al. Quality of methods reporting in animal models of colitis. Inflamm Bowel Dis. 2015 June; 21(6):1248-59. PMID: 25989337.
[1140] Byrne et al. CD4+CD45RBHi T cell transfer induced colitis in mice is accompanied by osteopenia which is treatable with recombinant human osteoprotegerin. Gut. 2005 January; 54(1):78-86. PMID: 15591508.
[1141] Callura et al. Tracking, Tuning and terminating microbial physiology using synthetic riboregulators. Proc Natl Acad Sci. 2010; 27(36):15898-903. PMID: 20713708.
[1142] Castiglione et al. The transcription factor DNR from Pseudomonas aeruginosa specifically requires nitric oxide and haem for the activation of a target promoter in Escherichia coli. Microbiology. 2009 September; 155(Pt 9):2838-44. PMID: 19477902.
[1143] Chassaing et al. Dextran sulfate sodium (DSS)-induced colitis in mice. Curr Protoc Immunol. 2014 Feb. 4; 104:Unit 15.25. PMID: 24510619.
[1144] Chassaing et al. Fecal lipocalin 2, a sensitive and broadly dynamic non-invasive biomarker for intestinal inflammation. PLoS One. 2012; 7(9):e44328. PMID: 22957064.
[1145] Ciorba et al. Induction of IDO-1 by immunostimulatory DNA limits severity of experimental colitis. J Immunol. 2010 Apr. 1; 184(7):3907-16. PMID: 20181893.
[1146] Clarkson et al. Diaminopimelic acid and lysine auxotrophs of Pseudomonas aeruginosa 8602. J Gen Microbiol. 1971 May; 66(2):161-9. PMID: 4999073.
[1147] Cohen et al. Biologic therapies in inflammatory bowel disease. Transl Res. 2014 June; 163(6):533-56. PMID: 24467968.
[1148] Collinson et al. Channel crossing: how are proteins shipped across the bacterial plasma membrane? Philos Trans R Soc Lond B Biol Sci. 2015; 370: 20150025. PMID: 26370937.
[1149] Corazza et al. Nonlymphocyte-derived tumor necrosis factor is required for induction of colitis in recombination activating gene (RAG)2(−/−) mice upon transfer of CD4(+)CD45RB(hi) T cells. J Exp Med. 1999 Nov. 15; 190(10):1479-92. PMID: 10562322.
[1150] Costa et al. Secretion systems in Gram-negative bacteria: structural and mechanistic insights. Nat Rev Microbiol. 2015; 13(6):343-59. PMID: 25978706.
[1151] Cuevas-Ramos et al. Escherichia coli induces DNA damage in vivo and triggers genomic instability in mammalian cells. Proc Natl Acad Sci USA. 2010 Jun. 22; 107(25):11537-42. PMID: 20534522.
[1152] Cutting. Bacillus probiotics. Food Microbiol. 2011 April; 28(2):214-20. PMID: 21315976.
[1153] Danino et al. Programmable probiotics for detection of cancer in urine. Sci Transl Med. 2015 May 27; 7(289):289ra84. PMID: 26019220.
[1154] Davis-Richardson et al. A model for the role of gut bacteria in the development of autoimmunity for type 1 diabetes. Diabetologia. 2015 July; 58(7):1386-93. PMID: 25957231.
[1155] Dinleyici et al. Saccharomyces boulardii CNCM I-745 in different clinical conditions. Expert Opin Biol Ther. 2014 November; 14(11):1593-609. PMID: 24995675.
[1156] Dohi et al. CD4+CD45RBHi interleukin-4 defective T cells elicit antral gastritis and duodenitis. Am J Pathol. 2004 October; 165(4):1257-68. PMID: 15466391.
[1157] Eiglmeier et al. Molecular genetic analysis of FNR-dependent promoters. Mol Microbiol. 1989 July; 3(7):869-78. PMID: 2677602.
[1158] Elson et al. The C3H/HeJBir mouse model: a high susceptibility phenotype for colitis. Int Rev Immunol. 2000; 19(1):63-75. PMID: 10723678.
[1159] El-Zaatari et al. Tryptophan catabolism restricts IFN-γ-expressing neutrophils and Clostridium difficile immunopathology. J Immunol. 2014 Jul. 15; 193(2):807-16. PMID: 24935925.
[1160] Erben et al. A guide to histomorphological evaluation of intestinal inflammation in mouse models. Int J Clin Exp Pathol. 2014 Jul. 15; 7(8):4557-76. PMID: 25197329.
[1161] Fasano A, Shea-Donohue T. Mechanisms of disease: the role of intestinal barrier function in the pathogenesis of gastrointestinal autoimmune diseases. Nat Clin Pract Gastroenterol Hepatol. 2005 September; 2(9):416-22. PMID: 16265432.
[1162] Fasano. Leaky gut and autoimmune diseases. Clin Rev Allergy Immunol. 2012 February; 42(1):71-8. PMID: 22109896.
[1163] Ferdinande et al. Inflamed intestinal mucosa features a specific epithelial expression pattern of indoleamine 2,3-dioxygenase. Int J Immunopathol Pharmacol. 2008 April-June; 21(2):289-95. PMID: 18547472.
[1164] Forrest et al. Levels of purine, kynurenine and lipid peroxidation products in patients with inflammatory bowel disease. In: Developments in Tryptophan and Serotonin Metabolism. 2003; 527:395-400. Allegri et al., ed. Springer Science+Business Media: New York.
[1165] Frenzel et al. Expression of recombinant antibodies. Front Immunol. 2013; 4:217. PMID: 23908655.
[1166] Furusawa et al. Commensal microbe-derived butyrate induces the differentiation of colonic regulatory T cells. Nature. 2013; 504:446-50. PMID: 24226770.
[1167] Galimand et al. Positive FNR-like control of anaerobic arginine degradation and nitrate respiration in Pseudomonas aeruginosa. J Bacteriol. 1991 March; 173(5):1598-606. PMID: 1900277.
[1168] Gardner et al. Construction of a genetic toggle switch in Escherichia coli. Nature. 2000; 403:339-42. PMID: 10659857.
[1169] Garrett et al. Communicable ulcerative colitis induced by T-bet deficiency in the innate immune system. Cell. 2007 Oct. 5; 131(1):33-45. PMID: 17923086.
[1170] Gerlach et al. Protein secretion systems and adhesins: the molecular armory of Gram-negative pathogens. Int J Med Microbiol. 2007; 297:401-15. PMID: 17482513.
[1171] Ghishan et al. Epithelial transport in inflammatory bowel diseases. Inflamm Bowel Dis. 2014 June; 20(6):1099-109. PMID: 24691115.
[1172] Gurtner et al. Inhibition of indoleamine 2,3-dioxygenase augments trinitrobenzene sulfonic acid colitis in mice. Gastroenterology. 2003 December; 125(6):1762-73. PMID: 14724829.
[1173] Hamer et al. Review article: the role of butyrate on colonic function. Aliment Pharmacol Ther. 2008 Jan. 15; 27(2):104-19. PMID: 17973645.
[1174] Hammer et al. Spontaneous inflammatory disease in transgenic rats expressing HLA-B27 and human beta 2m: an animal model of HLA-B27-associated human disorders. Cell. 1990 Nov. 30; 63(5):1099-112. PMID: 2257626.
[1175] Hasegawa et al. Activation of a consensus FNR-dependent promoter by DNR of Pseudomonas aeruginosa in response to nitrite. FEMS Microbiol Lett. 1998 Sep. 15; 166(2):213-7. PMID: 9770276.
[1176] Hermiston M L, Gordon J I. Inflammatory bowel disease and adenomas in mice expressing a dominant negative N-cadherin. Science. 1995 Nov. 17; 270(5239):1203-7. PMID: 7502046.
[1177] Hetzel et al. Acryloyl-CoA reductase from Clostridium propionicum. An enzyme complex of propionyl-CoA dehydrogenase and electron-transferring flavoprotein. Eur J Biochem. 2003 March; 270(5):902-10. PMID: 12603323.
[1178] Hillman. Simple, rapid method for determination of propionic acid and other short-chain fatty acids in serum. Clin Chem. 1978 May; 24(5):800-3. PMID: 647915.
[1179] Hoeren et al. Sequence and expression of the gene encoding the respiratory nitrous-oxide reductase from Paracoccus denitrificans. New and conserved structural and regulatory motifs. Eur J Biochem. 1993 Nov. 15; 218(1):49-57. PMID: 8243476.
[1180] Hristodorov et al. Recombinant H22(scFv) blocks CD64 and prevents the capture of anti-TNF monoclonal antibody. A potential strategy to enhance anti-TNF therapy. MAbs. 2014; 6(5):1283-9. PMID: 25517313.
[1181] Hsu et al. Differential mechanisms in the pathogenesis of autoimmune cholangitis versus inflammatory bowel disease in interleukin-2Ralpha(−/−) mice. Hepatology. 2009 January; 49(1):133-40. PMID: 19065673.
[1182] Ianiro et al. Fecal microbiota transplantation in inflammatory bowel disease: beyond the excitement. Medicine (Baltimore). 2014 October; 93(19):e97. PMID: 25340496.
[1183] Isabella et al. Deep sequencing-based analysis of the anaerobic stimulon in Neisseria gonorrhoeae. BMC Genomics. 2011 Jan. 20; 12:51. PMID: 21251255.
[1184] Iyer S S, Cheng G. Role of interleukin 10 transcriptional regulation in inflammation and autoimmune disease. Crit Rev Immunol. 2012; 32(1):23-63. PMID: 22428854.
[1185] Johansson et al. The inner of the two Muc2 mucin-dependent mucus layers in colon is devoid of bacteria. Proc Natl Acad Sci USA. 2008 Sep. 30; 105(39):15064-9. PMID: 18806221.
[1186] Kanai et al. A breakthrough in probiotics: Clostridium butyricum regulates gut homeostasis and anti-inflammatory response in inflammatory bowel disease. J Gastroenterol. 2015 September; 50(9):928-39. PMID: 25940150.
[1187] Keates et al. TransKingdom RNA interference: a bacterial approach to challenges in RNAi therapy and delivery. Biotechnol Genet Eng Rev. 2008; 25:113-27. PMID: 21412352.
[1188] Khor B, Gardet A, Xavier R J. Genetics and pathogenesis of inflammatory bowel disease. Nature. 2011 Jun. 15; 474(7351):307-17. PMID: 21677747.
[1189] Kleman et al. Acetate metabolism by Escherichia coli in high-cell-density fermentation. Appl Environ Microbiol. 1994 November; 60(11):3952-8. PMID: 7993084.
[1190] Lerner et al. (a) Changes in intestinal tight junction permeability associated with industrial food additives explain the rising incidence of autoimmune disease. Autoimmun Rev. 2015 June; 14(6):479-89. PMID: 25676324.
[1191] Lerner et al. (b) Rheumatoid arthritis-celiac disease relationship: Joints get that gut feeling. Autoimmun Rev. 2015 November; 14(11):1038-47. PMID: 26190704.
[1192] Low et al. Animal models of ulcerative colitis and their application in drug research. Drug Des Devel Ther. 2013 Nov. 12; 7:1341-57. PMID: 24250223.
[1193] Lukovac et al. Differential modulation by Akkermansia muciniphila and Faecalibacterium prausnitzii of host peripheral lipid metabolism and histone acetylation in mouse gut organoids. MBio. 2014 Aug. 12; 5(4). pii: e01438-14. PMID: 25118238.
[1194] MacPherson BR, Pfeiffer C J. Experimental production of diffuse colitis in rats. Digestion. 1978; 17(2):135-50. PMID: 627326.
[1195] Martinez et al. Deletion of Mtgr1 sensitizes the colonic epithelium to dextran sodium sulfate-induced colitis. Gastroenterology. 2006 August; 131(2):579-88. PMID: 16890610.
[1196] Matteoli et al. Gut CD103+ dendritic cells express indoleamine 2,3-dioxygenase which influences T regulatory/T effector cell balance and oral tolerance induction. Gut. 2010 May; 59(5):595-604. PMID: 20427394.
[1197] Meadow et al. Biosynthesis of diaminopimelic acid and lysine in Escherichia coli. Biochem J. 1959 July; 72(3):396-400. PMID: 16748796.
[1198] Mizoguchi. Animal models of inflammatory bowel disease. Prog Mol Biol Transl Sci. 2012; 105:263-320. PMID: 22137435.
[1199] Mombaerts et al. Spontaneous development of inflammatory bowel disease in T cell receptor mutant mice. Cell. 1993 Oct. 22; 75(2):274-82. PMID: 8104709.
[1200] Moolenbeek C, Ruitenberg E J. The “Swiss roll”: a simple technique for histological studies of the rodent intestine. Lab Anim. 1981 January; 15(1):57-9. PMID: 7022018.
[1201] Moore et al. Regulation of FNR dimerization by subunit charge repulsion. J Biol Chem. 2006 Nov. 3; 281(44):33268-75. PMID: 16959764.
[1202] Morrissey et al. CD4+ T cells that express high levels of CD45RB induce wasting disease when transferred into congenic severe combined immunodeficient mice. Disease development is prevented by cotransfer of purified CD4+ T cells. J Exp Med. 1993 Jul. 1; 178(1):237-44. PMID: 8100269.
[1203] Mourelle et al. Polyunsaturated phosphatidylcholine prevents stricture formation in a rat model of colitis. Gastroenterology. 1996 April; 110(4):1093-7. PMID: 8612998.
[1204] Nguyen et al. Lymphocyte-dependent and Th2 cytokine-associated colitis in mice deficient in Wiskott-Aldrich syndrome protein. Gastroenterology. 2007 October; 133(4):1188-97. PMID: 17764675.
[1205] Nielsen. New strategies for treatment of inflammatory bowel disease. Front Med (Lausanne). 2014; 1:3. PMID: 25685754.
[1206] Nougayrede et al. Escherichia coli induces DNA double-strand breaks in eukaryotic cells. Science. 2006 Aug. 11; 313(5788):848-51. PMID: 16902142.
[1207] Ohman et al. Regression of Peyer's patches in G alpha i2 deficient mice prior to colitis is associated with reduced expression of Bcl-2 and increased apoptosis. Gut. 2002 September; 51(3):392-7. PMID: 12171962.
[1208] Okayasu et al. A novel method in the induction of reliable experimental acute and chronic ulcerative colitis in mice. Gastroenterology. 1990 March; 98(3):694-702. PMID: 1688816.
[1209] Olier et al. Genotoxicity of Escherichia coli Nissle 1917 strain cannot be dissociated from its probiotic activity. Gut Microbes. 2012 November-December; 3(6):501-9. PMID: 22895085.
[1210] Ostanin et al. T cell transfer model of chronic colitis: concepts, considerations, and tricks of the trade. Am J Physiol Gastrointest Liver Physiol. 2009 February; 296(2):G135-46. PMID: 19033538.
[1211] Paun et al. Immuno-ecology: how the microbiome regulates tolerance and autoimmunity. Curr Opin Immunol. 2015 Oct. 10; 37:34-9. PMID: 26460968.
[1212] Pizarro et al. SAMP1/YitFc mouse strain: a spontaneous model of Crohn's disease-like ileitis. Inflamm Bowel Dis. 2011 December; 17(12):2566-84. PMID: 21557393.
[1213] Powrie et al. Phenotypically distinct subsets of CD4+ T cells induce or protect from chronic intestinal inflammation in C. B-17 scid mice. Int Immunol. 1993 November; 5(11):1461-71. PMID: 7903159.
[1214] Pugsley. The complete general secretory pathway in gram-negative bacteria. Microbiol Rev. 1993 March; 57(1):50-108. PMID: 8096622.
[1215] Purcell et al. Towards a whole-cell modeling approach for synthetic biology. Chaos. 2013 June; 23(2):025112. PMID: 23822510.
[1216] Ragsdale. Enzymology of the wood-Ljungdahl pathway of acetogenesis. Ann N Y Acad Sci. 2008 March; 1125:129-36. PMID: 18378591.
[1217] Ray et al. The effects of mutation of the anr gene on the aerobic respiratory chain of Pseudomonas aeruginosa. FEMS Microbiol Lett. 1997 Nov. 15; 156(2):227-32. PMID: 9513270.
[1218] Reeves et al. Engineering Escherichia coli into a protein delivery system for mammalian cells. ACS Synth Biol. 2015; 4(5):644-54. PMID: 25853840.
[1219] Reister et al. Complete genome sequence of the Gram-negative probiotic Escherichia coli strain Nissle 1917. J Biotechnol. 2014 Oct. 10; 187:106-7. PMID: 25093936.
[1220] Rembacken et al. Non-pathogenic Escherichia coli versus mesalazine for the treatment of ulcerative colitis: a randomised trial. Lancet. 1999 Aug. 21; 354(9179):635-9. PMID: 10466665.
[1221] Remington's Pharmaceutical Sciences, 22^{nd} ed. Mack Publishing Co.
[1222] Rigel et al. A new twist on an old pathway—accessory Sec systems. Mol Microbiol. 2008 July; 69(2):291-302. PMID: 18544071.
[1223] Sabiu et al. Indomethacin-induced gastric ulceration in rats: Ameliorative roles of Spondias mombin and Ficus exasperata. Pharm Biol. 2016 January; 54(1):180-6. PMID: 25815713.
[1224] Saier. Protein secretion and membrane insertion systems in Gram-negative bacteria. J Membr Biol. 2006; 214(2):75-90. PMID: 17546510.
[1225] Salmon et al. Global gene expression profiling in Escherichia coli K12. The effects of oxygen availability and FNR. J Biol Chem. 2003 Aug. 8; 278(32):29837-55. PMID: 12754220.
[1226] Sanz et al. Microbiota, inflammation and obesity. Adv Exp Med Biol. 2014; 817:291-317. PMID: 24997040.
[1227] Sanz et al. Understanding the role of gut microbiome in metabolic disease risk. Pediatr Res. 2015 January; 77(1-2):236-44. PMID: 25314581.
[1228] Sat et al. The Escherichia coli mazEF suicide module mediates thymineless death. J Bacteriol. 2003 March; 185(6):1803-7. PMID: 12618443.
[1229] Satoh et al. New ulcerative colitis model induced by sulfhydryl blockers in rats and the effects of antiinflammatory drugs on the colitis. Jpn J Pharmacol. 1997 April; 73(4):299-309. PMID: 9165366.
[1230] Sawers. Identification and molecular characterization of a transcriptional regulator from Pseudomonas aeruginosa PAO1 exhibiting structural and functional similarity to the FNR protein of Escherichia coli. Mol Microbiol. 1991 June; 5(6):1469-81. PMID: 1787797.
[1231] Schiel-Bengelsdorf et al. Pathway engineering and synthetic biology using acetogens. FEBS Lett. 2012 Jul. 16; 586(15):2191-8. PMID: 22710156.
[1232] Schultz. Clinical use of E. coli Nissle 1917 in inflammatory bowel disease. Inflamm Bowel Dis. 2008 July; 14(7):1012-8. Review. PMID: 18240278.
[1233] Segui et al. Superoxide dismutase ameliorates TNBS-induced colitis by reducing oxidative stress, adhesion molecule expression, and leukocyte recruitment into the inflamed intestine. J Leukoc Biol. 2004 September; 76(3):537-44. PMID: 15197232.
[1234] Selmer et al. Propionate CoA-transferase from Clostridium propionicum. Cloning of gene and identification of glutamate 324 at the active site. Eur J Biochem. 2002 January; 269(1):372-80. PMID: 11784332.
[1235] Simpson et al. IBD: microbiota manipulation through diet and modified bacteria. Dig Dis. 2014; 32 Suppl 1:18-25. PMID: 25531349.
[1236] Smith et al. The microbial metabolites, short-chain fatty acids, regulate colonic Treg cell homeostasis. Science. 2013 Aug. 2; 341(6145):569-73. PMID: 23828891.
[1237] Sonnenborn et al. The non-pathogenic Escherichia coli strain Nissle 1917—features of a versatile probiotic. Microbial Ecology in Health and Disease. 2009; 21:122-58.
[1238] Stanley et al. Acute infection and macrophage subversion by Mycobacterium tuberculosis require a specialized secretion system. Proc Natl Acad Sci USA. 2003 Oct.; 100(22):13001-6. PMID: 14557536.
[1239] Sugimoto et al. IL-22 ameliorates intestinal inflammation in a mouse model of ulcerative colitis. J Clin Invest. 2008 February; 118(2):534-44. PMID: 18172556.
[1240] Triantafillidis et al. Current and emerging drugs for the treatment of inflammatory bowel disease. Drug Des Devel Ther 5.5 (2011): 185-210.
[1241] Trunk et al. Anaerobic adaptation in Pseudomonas aeruginosa: definition of the Anr and Dnr regulons. Environ Microbiol. 2010 June; 12(6):1719-33. PMID: 20553552.
[1242] Tseng et al. Controlled biosynthesis of odd-chain fuels and chemicals via engineered modular metabolic pathways. Proc Natl Acad Sci USA. 2012 Oct. 30; 109(44):17925-30. PMID: 23071297.
[1243] Turski et al. Kynurenic Acid in the digestive system-new facts, new challenges. Int J Tryptophan Res. 2013 Sep. 4; 6:47-55. PMID: 24049450.
[1244] Ukena et al. Probiotic Escherichia coli Nissle 1917 inhibits leaky gut by enhancing mucosal integrity. PLoS One. 2007 Dec. 12; 2(12):e1308. PMID: 18074031.
[1245] Unden et al. Alternative respiratory pathways of Escherichia coli: energetics and transcriptional regulation in response to electron acceptors. Biochim Biophys Acta. 1997 Jul. 4; 1320(3):217-34. PMID: 9230919.
[1246] Varga et al. N-Methyl-D-aspartate receptor antagonism decreases motility and inflammatory activation in the early phase of acute experimental colitis in the rat. Neurogastroenterol Motil. 2010 February; 22(2):217-25. PMID: 19735360.
[1247] Wagner et al. Semisynthetic diet ameliorates Crohn's disease-like ileitis in TNFΔARE/WT mice through antigen-independent mechanisms of gluten. Inflamm Bowel Dis. 2013 May; 19(6):1285-94. PMID: 23567784.
[1248] Watanabe et al. Interleukin 7 transgenic mice develop chronic colitis with decreased interleukin 7 protein accumulation in the colonic mucosa. J Exp Med. 1998 Feb. 2; 187(3):389-402. PMID: 9449719.
[1249] Wei et al. Mesenteric B cells centrally inhibit CD4+ T cell colitis through interaction with regulatory T cell subsets. Proc Natl Acad Sci USA. 2005 Feb. 8; 102(6):2010-15. PMID: 15684084.
[1250] Wen et al. Innate immunity and intestinal microbiota in the development of Type 1 diabetes. Nature. 2008 Oct. 23; 455(7216):1109-13. PMID: 18806780.
[1251] Whittem et al. Murine colitis modeling using dextran sulfate sodium (DSS). J Vis Exp. 2010 Jan. 19; (35). PMID: 20087313.
[1252] Wilk et al. The mdr1a−/− mouse model of spontaneous colitis: a relevant and appropriate animal model to study inflammatory bowel disease. Immunol Res. 2005; 31(2):151-9. PMID: 15778512.
[1253] Williams G T, Williams W J. Granulomatous inflammation—a review. J Clin Pathol. 1983 July; 36(7):723-733. PMID: 6345591.
[1254] Winteler et al. The homologous regulators ANR of Pseudomonas aeruginosa and FNR of Escherichia coli have overlapping but distinct specificities for anaerobically inducible promoters. Microbiology. 1996 March; 142 (Pt 3):685-93. PMID: 8868444.
[1255] Wolf et al. Overexpression of indoleamine 2,3-dioxygenase in human inflammatory bowel disease. Clin Immunol. 2004 October; 113(1):47-55. PMID: 15380529.
[1256] Wright et al. GeneGuard: A Modular Plasmid System Designed for Biosafety. ACS Synth Biol. 2015 Mar. 20; 4(3):307-16. PMID: 24847673.
[1257] Xiao et al. Nanoparticles with surface antibody against CD98 and carrying CD98 small interfering RNA reduce colitis in mice. Gastroenterology. 2014 May; 146(5):1289-300. PMID: 24503126.
[1258] Yazbeck et al. Growth factor based therapies and intestinal disease: is glucagon-like peptide-2 the new way forward? Cytokine Growth Factor Rev. 2009 April; 20(2):175-84. PMID: 19324585.
[1259] Zhang et al. Deletion of interleukin-6 in mice with the dominant negative form of transforming growth factor beta receptor II improves colitis but exacerbates autoimmune cholangitis. Hepatology. 2010 July; 52(1):215-22. PMID: 20578264.
[1260] Zimmermann et al. Anaerobic growth and cyanide synthesis of Pseudomonas aeruginosa depend on anr, a regulatory gene homologous with fnr of Escherichia coli. Mol Microbiol. 1991 June; 5(6):1483-90. PMID: 1787798.

### EXAMPLES

[1261] The following examples provide illustrative embodiments of the disclosure. One of ordinary skill in the art will recognize the numerous modifications and variations that may be performed without altering the spirit or scope of the disclosure. Such modifications and variations are encompassed within the scope of the disclosure. The Examples do not in any way limit the disclosure.

### Example 1. Construction of Vectors for Producing Therapeutic Molecules

[1262] Butyrate

[1263] To facilitate inducible production of butyrate in Escherichia coli Nissle, the eight genes of the butyrate production pathway from Peptoclostridium difficile 630 (bcd2, etfB3, etfA3, thiA1, hbd, crt2, pbt, and buk; NCBI; Table 2 and Table 36), as well as transcriptional and translational elements, are synthesized (Gen9, Cambridge, Mass.) and cloned into vector pBR322 to create pLogic031 (bcd2-etfB3-etfA3-thiA1-hbd-crt2-pbt buk butyrate cassette, also referred to as bcd2-etfB3-etfA3 butyrate cassette, SEQ ID NO: 162).

[1264] The gene products of the bcd2-etfA3-etfB3 genes form a complex that converts crotonyl-CoA to butyryl-CoA and may exhibit dependence on oxygen as a co-oxidant. Because the recombinant bacteria of the invention are designed to produce butyrate in an oxygen-limited environment (e.g. the mammalian gut), that dependence on oxygen could have a negative effect of butyrate production in the gut. It has been shown that a single gene from Treponema denticola, trans-2-enoynl-CoA reductase (ter, Table 2 and Table 36), can functionally replace this three gene complex in an oxygen-independent manner. Therefore, a second butyrate gene cassette in which the ter gene replaces the bcd2-etfA3-etfB3 genes of the first butyrate cassette is synthesized (Genewiz, Cambridge, Mass.). The ter gene is codon-optimized for E. coli codon usage using Integrated DNA Technologies online codon optimization tool (https://www.idtdna.com/CodonOpt). The second butyrate gene cassette, as well as transcriptional and translational elements, is synthesized (Gen9, Cambridge, Mass.) and cloned into vector pBR322 to create pLogic046 (ter-thiA1-hbd-crt2-pbt buk butyrate cassette, also referred to herein as ter butyrate cassette or pbt buk butyrate cassette, SEQ ID NO: 163).

[1265] In a third butyrate gene cassette, the pbt and buk genes are replaced with tesB (SEQ ID NO: 10). TesB is a thioesterase found in E. coli that cleaves off the butyrate from butyryl-coA, thus obviating the need for pbt-buk (see, e.g., FIG. 2 and Table 2 and Table 36). The third butyrate gene cassette, as well as transcriptional and translational elements, is synthesized (Gen9, Cambridge, Mass.) and cloned into vector pBR322 to create pLOGIC046-delta pbt.buk/tesB+ (ter-thiA1-hbd-crt2-tesb butyrate cassette, also referred to herein as tesB butyrate cassette, SEQ ID NO: 164). Table 36 lists non-limiting examples for sequences of the three cassettes.

TABLE 36
Butyrate Cassette Sequences

| | | SEQ ID |
|---|---|---|
| Description | Sequence | NO |
| bcd2-etfB3- | atggatttaaattctaaaaaatatcagatgcttaaagagctatatgtaagcttcgctgaaaa | SEQ ID |
| etfA3-thiA 1 - | tgaagttaaacctttagcaacagaacttgatgaagaagaaagatttccttatgaaacagt | NO: 162 |
| hb- crt2-pbt- | ggaaaaaatggcaaaagcaggaatgatgggtataccatatccaaaagaatatggtgg | |
| buk butyrate | agaaggtggagacactgtaggatatataatggcagttgaagaattgtctagagtttgtgg | |
| cassette | tactacaggagttatattatcagctcatacatctcttggctcatggcctatatatcaatatgg | |
| | taatgaagaacaaaaacaaaaattcttaagaccactagcaagtggagaaaaattagga | |
| | gcatttggtcttactgagcctaatgctggtacagatgcgtctggccaacaaacaactgct | |
| | gttttagacggggatgaatacatacttaatggctcaaaaatatttataacaaacgcaatag | |
| | ctggtgacatatatgtagtaatggcaatgactgataaatctaaggggaacaaaggaata | |
| | tcagcatttatagttgaaaaaggaactcctgggtttagctttggagttaaagaaaagaaa | |
| | atgggtataagaggttcagctacgagtgaattaatatttgaggattgcagaatacctaaa | |
| | gaaaatttacttggaaaagaaggtcaaggatttaagatagcaatgtctactcttgatggtg | |
| | gtagaattggtatagctgcacaagctttaggtttagcacaaggtgctcttgatgaaactgt | |
| | taaatatgtaaaagaaagagtacaatttggtagaccattatcaaaattccaaaatacaca | |
| | attccaattagctgatatggaagttaaggtacaagcggctagacaccttgtatatcaagc | |
| | agctataaataaagacttaggaaaaccttatggagtagaagcagcaatggcaaaattat | |
| | ttgcagctgaaacagctatggaagttactacaaaagctgtacaacttcatggaggatatg | |
| | gatacactcgtgactatccagtagaaagaatgatgagagatgctaagataactgaaata | |
| | tatgaaggaactagtgaagttcaaagaatggttatttcaggaaaactattaaaatagtaa | |
| | gaaggagatatacatatggaggaaggatttatgaatatagtcgtttgtataaaacaagttc | |
| | cagatacaacagaagttaaactagatcctaatacaggtactttaattagagatggagtac | |
| | caagtataataaaccctgatgataaagcaggtttagaagaagctataaaattaaaagaa | |
| | gaaatgggtgctcatgtaactgttataacaatgggacctcctcaagcagatatggcttta | |
| | aaagaagctttagcaatgggtgcagatagaggtatattattaacagatagagcatttgcg | |
| | ggtgctgatacttgggcaacttcatcagcattagcaggagcattaaaaaatatagattttg | |
| | atattataatagctggaagacaggcgatagatggagatactgcacaagttggacctcaa | |
| | atagctgaacatttaaatcttccatcaataacatatgctgaagaaataaaaactgaaggtg | |
| | aatatgtattagtaaaaagacaatttgaagattgttgccatgacttaaaagttaaaatgcca | |
| | tgccttataacaactcttaaagatatgaacacaccaagatacatgaaagttggaagaata | |
| | tatgatgctttcgaaaatgatgtagtagaaacatggactgtaaaagatatagaagttgac | |
| | ccttctaatttaggtcttaaaggttctccaactagtgtatttaaatcatttacaaaatcagtta | |
| | aaccagaggtacaatatacaatgaagatgcgaaaacatcagctggaattatcatagat | |
| | aaattaaaagagaagtatatcatataataagaaggagatatacatatgggtaacgttttag | |
| | tagtaatagaacaaagagaaaatgtaattcaaactgtttctttagaattactaggaaaggc | |
| | tacagaaatagcaaaagattatgatacaaaagtttctgcattacttttaggtagtaaggta | |
| | gaaggtttaatagatacattagcacactatggtgcagatgaggtaatagtagtagatgat | |
| | gaagctttagcagtgtatacaactgaaccatatacaaaagcagcttatgaagcaataaa | |
| | agcagctgaccctatagttgtattatttggtgcaacttcaataggtagagatttagcgcct | |
| | agagtttctgctagaatacatacaggtcttactgctgactgtacaggtcttgcagtagctg | |
| | aagatacaaaattattattaatgacaagacctgcctttggtggaaatataatggcaacaat | |
| | agtttgtaaagatttcagacctcaaatgtctacagttagaccaggggttatgaagaaaaa | |
| | tgaacctgatgaaactaaagaagctgtaattaaccgtttcaaggtagaatttaatgatgct | |
| | gataaattagttcaagttgtacaagtaataaaagaagctaaaaaacaagttaaaatagaa | |
| | gatgctaagatattagtttctgctggacgtggaatgggtggaaaagaaaacttagacata | |
| | ctttatgaattagctgaaattataggtggagaagtttctggttctcgtgccactatagatgc | |
| | aggttggttagataaagcaagacaagttggtcaaactggtaaaactgtaagaccagac | |
| | ctttatatagcatgtggtatataggagcaatacaacatatagctggtatggaagatgctg | |
| | agtttatagttgctataaataaaaatccagaagctccaatatttaaatatgctgatgttggta | |
| | tagttggagatgttcataaagtgcttccagaacttatcagtcagttaagtgttgcaaaaga | |
| | aaaaggtgaagttttagctaactaataagaaggagatatacatatgagagaagtagtaat | |
| | tgccagtgcagctagaacagcagtaggaagttttggaggagcatttaaatcagtttcag | |
| | cggtagagttaggggtaacagcagctaaagaagctataaaaagagctaacataactcc | |
| | agatatgatagatgaatctcttttagggggagtacttacagcaggtcttggacaaaatata | |
| | gcaagacaaatagcattaggagcaggaataccagtagaaaaaccagctatgactataa | |
| | atatagtttgtggttctggattaagatctgtttcaatggcatctcaacttatagcattaggtg | |
| | atgctgatataatgttagttggtggagctgaaaacatgagtatgtctccttatttagtacca | |
| | agtgcgagatatggtgcaagaatgggtgatgctgcttttgttgattcaatgataaaagat | |
| | ggattatcagacatatttaataactatcacatgggtattactgctgaaaacatagcagagc | |
| | aatggaatataactagagaagaacaagatgaattagctcttgcaagtcaaaataaagct | |
| | gaaaaagctcaagctgaaggaaaatttgatgaagaaatagttcctgttgttataaaagga | |
| | agaaaaggtgacactgtagtagataaagatgaatatattaagcctggcactacaatgga | |
| | gaaacttgctaagttaagacctgcatttaaaaaagatggaacagttactgctggtaatgc | |
| | atcaggaataaatgatggtgctgctatgttagtagtaatggctaaagaaaaagctgaag | |
| | aactaggaatagagcctcttgcaactatagtttcttatggaacagctggtgttgaccctaa | |
| | aataatgggatatggaccagttccagcaactaaaaaagctttagaagctgctaatatga | |
| | ctattgaagatatagatttagttgaagctaatgaggcatttgctgcccaatctgtagctgta | |
| | ataagagacttaaatatagatatgaataaagttaatgttaatggtggagcaatagctatag | |
| | gacatccaataggatgctcaggagcaagaatacttactacacttttatatgaaatgaaga | |
| | gaagagatgctaaaactggtcttgctacactttgtataggcggtggaatgggaactactt | |
| | taatagttaagagatagtaagaaggagatatacatatgaaattagctgtaataggtagtg | |
| | gaactatgggaagtggtattgtacaaacttttgcaagttgtggacatgatgtatgtttaaa | |
| | gagtagaactcaaggtgctatagataaatgtttagctttattagataaaaatttaactaagtt | |
| | agttactaagggaaaaatggatgaagctacaaaagcagaaatattaagtcatgttagttc | |
| | aactactaattatgaagatttaaaagatatggatttaataatagaagcatctgtagaagac | |
| | atgaatataaagaaagatgttttcaagttactagatgaattatgtaaagaagatactatctt | |
| | ggcaacaaatacttcatcattatctataacagaaatagcacttctactaagcgcccagat | |
| | aaagttataggaatgcatttctttaatccagttcctatgatgaaattagttgaagttataagt | |
| | ggtcagttaacatcaaaagttacttttgatacagtatttgaattatctaagagtatcaataaa | |
| | gtaccagtagatgtatctgaatctcctggatttgtagtaaatagaatacttatacctatgata | |
| | aatgaagctgttggtatatatgcagatggtgttgcaagtaaagaagaaatagatgaagct | |
| | atgaaattaggagcaaaccatccaatgggaccactagcattaggtgatttaatcggatta | |
| | gatgttgttttagctataatgaacgttttatatactgaatttggagatactaaatatagacctc | |
| | atccacttttagctaaaatggttagagctaatcaattaggaagaaaaactaagataggatt | |
| | ctatgattataataaataataagaaggagatatacatatgagtacaagtgatgttaaagttt | |
| | atgagaatgtagctgttgaagtagatggaaatatatgtacagtgaaaatgaatagaccta | |
| | aagcccttaatgcaataaattcaaagactttagaagaactttatgaagtatttgtagatatt | |
| | aataatgatgaaactattgatgttgtaatattgacaggggaaggaaaggcatttgtagct | |
| | ggagcagatattgcatacatgaaagatttagatgctgtagctgctaaagattttagtatctt | |
| | aggagcaaaagcttttggagaaatagaaaatagtaaaaaagtagtgatagctgctgtaa | |
| | acggatttgctttaggtggaggatgtgaacttgcaatggcatgtgatataagaattgcatc | |
| | tgctaaagctaaatttggtcagccagaagtaactcttggaataactccaggatatggag | |
| | gaactcaaaggcttacaagattggttggaatggcaaaagcaaaagaattaatctttaca | |
| | ggtcaagttataaaagctgatgaagctgaaaaaatagggctagtaaatagagtcgttga | |
| | gccagacattttaatagaagaagttgagaaattagctaagataatagctaaaaatgctca | |
| | gcttgcagttagatactctaaagaagcaatacaacttggtgctcaaactgatataaatact | |
| | ggaatagatatagaatctaatttatttggtctttgtttttcaactaaagaccaaaaagaagg | |
| | aatgtcagctttcgttgaaaagagagaagctaactttataaaagggtaataagaaggag | |
| | atatacatatgagaagttttgaagaagtaattaagtttgcaaaagaaagaggacctaaaa | |
| | ctatatcagtagcatgttgccaagataaagaagttttaatggcagttgaaatggctagaa | |
| | aagaaaaaatagcaaatgccattttagtaggagatatagaaaagactaaagaaattgca | |
| | aaaagcatagacatggatatcgaaaattatgaactgatagatataaaagatttagcagaa | |
| | gcatctctaaaatctgttgaattagtttcacaaggaaaagccgacatggtaatgaaaggc | |
| | ttagtagacacatcaataatactaaaagcagttttaaataaagaagtaggtcttagaactg | |
| | gaaatgtattaagtcacgtagcagtatttgatgtagagggatatgatagattatttttcgta | |
| | actgacgcagctatgaacttagctcctgatacaaatactaaaaagcaaatcatagaaaat | |
| | gcttgcacagtagcacattcattagatataagtgaaccaaaagttgctgcaatatgcgca | |
| | aaagaaaaagtaaatccaaaaatgaaagatacagttgaagctaaagaactagaagaa | |
| | atgtatgaaagaggagaaatcaaaggttgtatggttggtgggccttttgcaattgataat | |
| | gcagtatctttagaagcagctaaacataaaggtataaatcatcctgtagcaggacgagc | |
| | tgatatattattagccccagatattgaaggtggtaacatattatataaagctttggtattcttc | |
| | tcaaaatcaaaaaatgcaggagttatagttggggctaaagcaccaataatattaacttct | |
| | agagcagacagtgaagaaactaaactaaactcaatagctttaggtgttttaatggcagc | |
| | aaaggcataataagaaggagatatacatatgagcaaaatatttaaaatcttaacaataaa | |
| | tcctggttcgacatcaactaaaatagctgtatttgataatgaggatttagtatttgaaaaaa | |
| | ctttaagacattcttcagaagaaataggaaaatatgagaaggtgtctgaccaatttgaatt | |
| | tcgtaaacaagtaatagaagaagctctaaaagaaggtggagtaaaaacatctgaattag | |
| | atgctgtagtaggtagaggaggacttcttaaacctataaaaggtggtacttattcagtaa | |
| | gtgctgctatgattgaagatttaaaagtgggagttttaggagaacacgcttcaaacctag | |
| | gtggaataatagcaaaacaaataggtgaagaagtaaatgttccttcatacatagtagac | |
| | cctgttgttgtagatgaattagaagatgttgctagaatttctggtatgcctgaaataagtag | |
| | agcaagtgtagtacatgctttaaatcaaaaggcaatagcaagaagatatgctagagaaa | |
| | taaacaagaaatatgaagatataaatcttatagttgcacacatgggtggaggagtttctgt | |
| | tggagctcataaaaatggtaaaatagtagatgttgcaaacgcattagatggagaaggac | |
| | ctttctctccagaaagaagtggtggactaccagtaggtgcattagtaaaaatgtgctttag | |
| | tggaaaatatactcaagatgaaattaaaaagaaaataaaaggtaatggcggactagttg | |
| | catacttaaacactaatgatgctagagaagttgaagaaagaattgaagctggtgatgaa | |
| | aaagctaaattagtatatgaagctatggcatatcaaatctctaaagaaataggagctagt | |
| | gctgcagttcttaagggagatgtaaaagcaatattattaactggtggaatcgcatattcaa | |
| | aaatgtttacagaaatgattgcagatagagttaaatttatagcagatgtaaaagtttatcca | |
| | ggtgaagatgaaatgattgcattagctcaaggtggacttagagttttaactggtgaagaa | |
| | gaggctcaagtttatgataactaataa | |
| ter-thiA 1 -hbd- | atgatcgtaaaacctatggtacgcaacaatatctgcctgaacgcccatcctcagggctg | SEQ ID |
| crt2-pbt buk | caagaagggagtggaagatcagattgaatataccaagaaacgcattaccgcagaagt | NO: 163 |
| butyrate | caaagctggcgcaaaagctccaaaaaacgttctggtgcttggctgctcaaatggttacg | |
| cassette | gcctggcgagccgcattactgctgcgttcggatacggggctgcgaccatcggcgtgtc | |
| | ctttgaaaaagcgggttcagaaaccaaatatggtacaccgggatggtacaataatttgg | |
| | catttgatgaagcggcaaaacgcgagggtctttatagcgtgacgatcgacggcgatgc | |
| | gttttcagacgagatcaaggcccaggtaattgaggaagccaaaaaaaaaggtatcaaa | |
| | tttgatctgatcgtatacagcttggccagcccagtacgtactgatcctgatacaggtatca | |
| | tgcacaaaagcgttttgaaaccctttggaaaaacgttcacaggcaaaacagtagatccg | |
| | tttactggcgagctgaaggaaatctccgcggaaccagcaaatgacgaggaagcagcc | |
| | gccactgttaaagttatggggggtgaagattgggaacgttggattaagcagctgtcgaa | |
| | ggaaggcctcttagaagaaggctgtattaccttggcctatagttatattggccctgaagc | |
| | tacccaagctttgtaccgtaaaggcacaatcggcaaggccaaagaacacctggaggc | |
| | cacagcacaccgtctcaacaaagagaacccgtcaatccgtgccttcgtgagcgtgaat | |
| | aaaggcctggtaacccgcgcaagcgccgtaatcccggtaatccctctgtatctcgcca | |
| | gcttgttcaaagtaatgaaagagaagggcaatcatgaaggttgtattgaacagatcacg | |
| | cgtctgtacgccgagcgcctgtaccgtaaagatggtacaattccagttgatgaggaaaa | |
| | tcgcattcgcattgatgattgggagttagaagaagacgtccagaaagcggtatccgcgt | |
| | tgatggagaaagtcacgggtgaaaacgcagaatctctcactgacttagcggggtaccg | |
| | ccatgatttcttagctagtaacggctttgatgtagaaggtattaattatgaagcggaagttg | |
| | aacgcttcgaccgtatctgataagaaggagatatacatatgagagaagtagtaattgcc | |
| | agtgcagctagaacagcagtaggaagttttggaggagcatttaaatcagtttcagcggt | |
| | agagttaggggtaacagcagctaaagaagctataaaaagagctaacataactccagat | |
| | atgatagatgaatctcttttagggggagtacttacagcaggtcttggacaaaatatagca | |
| | agacaaatagcattaggagcaggaataccagtagaaaaaccagctatgactataaata | |
| | tagtttgtggttctggattaagatctgtttcaatggcatctcaacttatagcattaggtgatg | |
| | ctgatataatgttagttggtggagctgaaaacatgagtatgtctccttatttagtaccaagt | |
| | gcgagatatggtgcaagaatgggtgatgctgcttttgttgattcaatgataaaagatgga | |
| | ttatcagacatatttaataactatcacatgggtattactgctgaaaacatagcagagcaat | |
| | ggaatataactagagaagaacaagatgaattagctcttgcaagtcaaaataaagctgaa | |
| | aaagctcaagctgaaggaaaatttgatgaagaaatagttcctgttgttataaaaggaaga | |
| | aaaggtgacactgtagtagataaagatgaatatattaagcctggcactacaatggagaa | |
| | acttgctaagttaagacctgcatttaaaaaagatggaacagttactgctggtaatgcatca | |
| | ggaataaatgatggtgctgctatgttagtagtaatggctaaagaaaaagctgaagaact | |
| | aggaatagagcctcttgcaactatagtttcttatggaacagctggtgttgaccctaaaata | |
| | atgggatatggaccagttccagcaactaaaaaagctttagaagctgctaatatgactatt | |
| | gaagatatagatttagttgaagctaatgaggcatttgctgcccaatctgtagctgtaataa | |
| | gagacttaaatatagatatgaataaagttaatgttaatggtggagcaatagctataggac | |
| | atccaataggatgctcaggagcaagaatacttactacacttttatatgaaatgaagagaa | |
| | gagatgctaaaactggtcttgctacactttgtataggcggtggaatgggaactactttaat | |
| | agttaagagatagtaagaaggagatatacatatgaaattagctgtaataggtagtggaa | |
| | ctatgggaagtggtattgtacaaacttttgcaagttgtggacatgatgtatgtttaaagagt | |
| | agaactcaaggtgctatagataaatgtttagctttattagataaaaatttaactaagttagtt | |
| | actaagggaaaaatggatgaagctacaaaagcagaaatattaagtcatgttagttcaac | |
| | tactaattatgaagatttaaaagatatggatttaataatagaagcatctgtagaagacatg | |
| | aatataaagaaagatgttttcaagttactagatgaattatgtaaagaagatactatcttggc | |
| | aacaaatacttcatcattatctataacagaaatagcttcttctactaagcgcccagataaa | |
| | gttataggaatgcatttctttaatccagttcctatgatgaaattagttgaagttataagtggt | |
| | cagttaacatcaaaagttacttttgatacagtatttgaattatctaagagtatcaataaagta | |
| | ccagtagatgtatctgaatctcctggatttgtagtaaatagaatacttatacctatgataaat | |
| | gaagctgttggtatatatgcagatggtgttgcaagtaaagaagaaatagatgaagctat | |
| | gaaattaggagcaaaccatccaatgggaccactagcattaggtgatttaatcggattag | |
| | atgttgttttagctataatgaacgttttatatactgaatttggagatactaaatatagacctca | |
| | tccacttttagctaaaatggttagagctaatcaattaggaagaaaaactaagataggattc | |
| | tatgattataataaataataagaaggagatatacatatgagtacaagtgatgttaaagttta | |
| | tgagaatgtagctgttgaagtagatggaaatatatgtacagtgaaaatgaatagacctaa | |
| | agcccttaatgcaataaattcaaagactttagaagaactttatgaagtatttgtagatatta | |
| | ataatgatgaaactattgatgttgtaatattgacaggggaaggaaaggcatttgtagctg | |
| | gagcagatattgcatacatgaaagatttagatgctgtagctgctaaagattttagtatctta | |
| | ggagcaaaagcttttggagaaatagaaaatagtaaaaaagtagtgatagctgctgtaaa | |
| | cggatttgctttaggtggaggatgtgaacttgcaatggcatgtgatataagaattgcatct | |
| | gctaaagctaaatttggtcagccagaagtaactcttggaataactccaggatatggagg | |
| | aactcaaaggcttacaagattggttggaatggcaaaagcaaaagaattaatctttacag | |
| | gtcaagttataaaagctgatgaagctgaaaaaatagggctagtaaatagagtcgttgag | |
| | ccagacattttaatagaagaagttgagaaattagctaagataatagctaaaaatgctcag | |
| | cttgcagttagatactCtaaagaagmatacaacttggtgCtcaaaCtgatataaatactg | |
| | gaatagatatagaatctaatttatttggtctttgtttttcaactaaagaccaaaaagaagga | |
| | atgtcagctttcgttgaaaagagagaagctaactttataaaagggtaataagaaggaga | |
| | tatacatatgagaagttttgaagaagtaattaagtttgcaaaagaaagaggacctaaaac | |
| | tatatcagtagcatgttgccaagataaagaagttttaatggcagttgaaatggctagaaa | |
| | agaaaaaatagcaaatgccattttagtaggagatatagaaaagactaaagaaattgcaa | |
| | aaagcatagacatggatatcgaaaattatgaactgatagatataaaagatttagcagaa | |
| | gcatctctaaaatctgttgaattagtttcacaaggaaaagccgacatggtaatgaaaggc | |
| | ttagtagacacatcaataatactaaaagcagttttaaataaagaagtaggtcttagaactg | |
| | gaaatgtattaagtcacgtagcagtatttgatgtagagggatatgatagattatttttcgta | |
| | actgacgcagctatgaacttagctcctgatacaaatactaaaaagcaaatcatagaaaat | |
| | gcttgcacagtagacattcattagatataagtgaaccaaaagttgctgcaatatgcgca | |
| | aaagaaaaagtaaatccaaaaatgaaagatacagttgaagctaaagaactagaagaa | |
| | atgtatgaaagaggagaaatcaaaggttgtatggttggtgggccttttgcaattgataat | |
| | gcagtatctttagaagcagctaaacataaaggtataaatcatcctgtagcaggacgagc | |
| | tgatatattattagccccagatattgaaggtggtaacatattatataaagctttggtattcttc | |
| | tcaaaatcaaaaaatgcaggagttatagttggggctaaagcaccaataatattaacttct | |
| | agagcagacagtgaagaaactaaactaaactcaatagctttaggtgttttaatggcagc | |
| | aaaggcataataagaaggagatatacatatgagcaaaatatttaaaatcttaacaataaa | |
| | tcctggttcgacatcaactaaaatagctgtatttgataatgaggatttagtatttgaaaaaa | |
| | ctttaagacattcttcagaagaaataggaaaatatgagaaggtgtctgaccaatttgaatt | |
| | tcgtaaacaagtaatagaagaagctctaaaagaaggtggagtaaaaacatctgaattag | |
| | atgctgtagtaggtagaggaggacttcttaaacctataaaaggtggtacttattcagtaa | |
| | gtgctgctatgattgaagatttaaaagtgggagttttaggagaacacgcttcaaacctag | |
| | gtggaataatagcaaaacaaataggtgaagaagtaaatgttccttcatacatagtagac | |
| | cctgttgttgtagatgaattagaagatgttgctagaatttctggtatgcctgaaataagtag | |
| | agcaagtgtagtacatgctttaaatcaaaaggcaatagcaagaagatatgctagagaaa | |
| | taaacaagaaatatgaagatataaatcttatagttgcacacatgggtggaggagtttctgt | |
| | tggagctcataaaaatggtaaaatagtagatgttgcaaacgcattagatggagaaggac | |
| | ctttctctccagaaagaagtggtggactaccagtaggtgcattagtaaaaatgtgctttag | |
| | tggaaaatatactcaagatgaaattaaaaagaaaataaaaggtaatggcggactagttg | |
| | catacttaaacactaatgatgctagagaagttgaagaaagaattgaagctggtgatgaa | |
| | aaagctaaattagtatatgaagctatggcatatcaaatctctaaagaaataggagctagt | |
| | gctgcagttcttaagggagatgtaaaagcaatattattaactggtggaatcgcatattcaa | |
| | aaatgtttacagaaatgattgcagatagagttaaatttatagcagatgtaaaagtttatcca | |
| | ggtgaagatgaaatgattgcattagctcaaggtggacttagagttttaactggtgaagaa | |
| | gaggctcaagtttatgataactaataa | |
| ter-thiA 1 -hbd- | atgatcgtaaaacctatggtacgcaacaatatctgcctgaacgcccatcctcagggctg | SEQ ID |
| crt2-tesb | caagaagggagtggaagatcagattgaatataccaagaaacgcattaccgcagaagt | NO: 164 |
| butyrate | caaagctggcgcaaaagctccaaaaaacgttctggtgcttggctgctcaaatggttacg | |
| cassette | gcctggcgagccgcattactgctgcgttcggatacggggctgcgaccatcggcgtgtc | |
| | ctttgaaaaagcgggttcagaaaccaaatatggtacaccgggatggtacaataatttgg | |
| | catttgatgaagcggcaaaacgcgagggtctttatagcgtgacgatcgacggcgatgc | |
| | gttttcagacgagatcaaggcccaggtaattgaggaagccaaaaaaaaaggtatcaaa | |
| | tttgatctgatcgtatacagcttggccagcccagtacgtactgatcctgatacaggtatca | |
| | tgcacaaaagcgttttgaaaccctttggaaaaacgttcacaggcaaaacagtagatccg | |
| | tttactggcgagctgaaggaaatctccgcggaaccagcaaatgacgaggaagcagcc | |
| | gccactgttaaagttatggggggtgaagattgggaacgttggattaagcagctgtcgaa | |
| | ggaaggcctcttagaagaaggctgtattaccttggcctatagttatattggccctgaagc | |
| | tacccaagctttgtaccgtaaaggcacaatcggcaaggccaaagaacacctggaggc | |
| | cacagcacaccgtctcaacaaagagaacccgtcaatccgtgccttcgtgagcgtgaat | |
| | aaaggcctggtaacccgcgcaagcgccgtaatcccggtaatccctctgtatctcgcca | |
| | gcttgttcaaagtaatgaaagagaagggcaatcatgaaggttgtattgaacagatcacg | |
| | cgtctgtacgccgagcgcctgtaccgtaaagatggtacaattccagttgatgaggaaaa | |
| | tcgcattcgcattgatgattgggagttagaagaagacgtccagaaagcggtatccgcgt | |
| | tgatggagaaagtcacgggtgaaaacgcagaatctctcactgacttagcggggtaccg | |
| | ccatgatttcttagctagtaacggctttgatgtagaaggtattaattatgaagcggaagttg | |
| | aacgcttcgaccgtatctgataagaaggagatatacatatgagagaagtagtaattgcc | |
| | agtgcagctagaacagcagtaggaagttttggaggagcatttaaatcagtttcagcggt | |
| | agagttaggggtaacagcagctaaagaagctataaaaagagctaacataactccagat | |
| | atgatagatgaatctcttttagggggagtacttacagcaggtcttggacaaaatatagca | |
| | agacaaatagcattaggagcaggaataccagtagaaaaaccagctatgactataaata | |
| | tagtttgtggttctggattaagatctgtttcaatggcatctcaacttatagcattaggtgatg | |
| | ctgatataatgttagttggtggagctgaaaacatgagtatgtctccttatttagtaccaagt | |
| | gcgagatatggtgcaagaatgggtgatgctgcttttgttgattcaatgataaaagatgga | |
| | ttatcagacatatttaataactatcacatgggtattactgctgaaaacatagcagagcaat | |
| | ggaatataactagagaagaacaagatgaattagctcttgcaagtcaaaataaagctgaa | |
| | aaagctcaagctgaaggaaaatttgatgaagaaatagttcctgttgttataaaaggaaga | |
| | aaaggtgacactgtagtagataaagatgaatatattaagcctggcactacaatggagaa | |
| | acttgctaagttaagacctgcatttaaaaaagatggaacagttactgctggtaatgcatca | |
| | ggaataaatgatggtgctgctatgttagtagtaatggctaaagaaaaagctgaagaact | |
| | aggaatagagcctcttgcaactatagtttcttatggaacagctggtgttgaccctaaaata | |
| | atgggatatggaccagttccagcaactaaaaaagctttagaagctgctaatatgactatt | |
| | gaagatatagatttagttgaagctaatgaggcatttgctgcccaatctgtagctgtaataa | |
| | gagacttaaatatagatatgaataaagttaatgttaatggtggagcaatagctataggac | |
| | atccaataggatgctcaggagcaagaatacttactacacttttatatgaaatgaagagaa | |
| | gagatgctaaaactggtcttgctacactttgtataggcggtggaatgggaactactttaat | |
| | agttaagagatagtaagaaggagatatacatatgaaattagctgtaataggtagtggaa | |
| | ctatgggaagtggtattgtacaaacttttgcaagttgtggacatgatgtatgtttaaagagt | |
| | agaactcaaggtgctatagataaatgtttagctttattagataaaaatttaactaagttagtt | |
| | actaagggaaaaatggatgaagctacaaaagcagaaatattaagtcatgttagttcaac | |
| | tactaattatgaagatttaaaagatatggatttaataatagaagcatctgtagaagacatg | |
| | aatataaagaaagatgttttcaagttactagatgaattatgtaaagaagatactatcttggc | |
| | aacaaatacttcatcattatctataacagaaatagcttcttctactaagcgcccagataaa | |
| | gttataggaatgcatttctttaatccagttcctatgatgaaattagttgaagttataagtggt | |
| | cagttaacatcaaaagttacttttgatacagtatttgaattatctaagagtatcaataaagta | |
| | ccagtagatgtatctgaatctcctggatttgtagtaaatagaatacttatacctatgataaat | |
| | gaagctgttggtatatatgcagatggtgttgcaagtaaagaagaaatagatgaagctat | |
| | gaaattaggagcaaaccatccaatgggaccactagcattaggtgatttaatcggattag | |
| | atgttgttttagctataatgaacgttttatatactgaatttggagatactaaatatagacctca | |
| | tccacttttagctaaaatggttagagctaatcaattaggaagaaaaactaagataggattc | |
| | tatgattataataaataataagaaggagatatacatatgagtacaagtgatgttaaagttta | |
| | tgagaatgtagctgttgaagtagatggaaatatatgtacagtgaaaatgaatagacctaa | |
| | agcccttaatgcaataaattcaaagactttagaagaactttatgaagtatttgtagatatta | |
| | ataatgatgaaactattgatgttgtaatattgacaggggaaggaaaggcatttgtagctg | |
| | gagcagatattgcatacatgaaagatttagatgctgtagctgctaaagattttagtatctta | |
| | ggagcaaaagcttttggagaaatagaaaatagtaaaaaagtagtgatagctgctgtaaa | |
| | cggatttgctttaggtggaggatgtgaacttgcaatggcatgtgatataagaattgcatct | |
| | gctaaagctaaatttggtcagccagaagtaactcttggaataactccaggatatggagg | |
| | aactcaaaggcttacaagattggttggaatggcaaaagcaaaagaattaatctttacag | |
| | gtcaagttataaaagctgatgaagctgaaaaaatagggctagtaaatagagtcgttgag | |
| | ccagacattttaatagaagaagttgagaaattagctaagataatagctaaaaatgctcag | |
| | cttgcagttagatactctaaagaagcaatacaacttggtgctcaaactgatataaatactg | |
| | gaatagatatagaatctaatttatttggtctttgtttttcaactaaagaccaaaaagaagga | |
| | atgtcagctttcgttgaaaagagagaagctaactttataaaagggtaataagaaggaga | |
| | tatacatatgAGTCAGGCGCTAAAAAATTTACTGACATTGT | |
| | TAAATCTGGAAAAAATTGAGGAAGGACTCTTTCGCG | |
| | GCCAGAGTGAAGATTTAGGTTTACGCCAGGTGTTTG | |
| | GCGGCCAGGTCGTGGGTCAGGCCTTGTATGCTGCAA | |
| | AAGAGACCGTCCCTGAAGAGCGGCTGGTACATTCGT | |
| | TTCACAGCTACTTTCTTCGCCCTGGCGATAGTAAGAA | |
| | GCCGATTATTTATGATGTCGAAACGCTGCGTGACGG | |
| | TAACAGCTTCAGCGCCCGCCGGGTTGCTGCTATTCA | |
| | AAACGGCAAACCGATTTTTTATATGACTGCCTCTTTC | |
| | CAGGCACCAGAAGCGGGTTTCGAACATCAAAAAAC | |
| | AATGCCGTCCGCGCCAGCGCCTGATGGCCTCCCTTC | |
| | GGAAACGCAAATCGCCCAATCGCTGGCGCACCTGCT | |
| | GCCGCCAGTGCTGAAAGATAAATTCATCTGCGATCG | |
| | TCCGCTGGAAGTCCGTCCGGTGGAGTTTCATAACCC | |
| | ACTGAAAGGTCACGTCGCAGAACCACATCGTCAGGT | |
| | GTGGATCCGCGCAAATGGTAGCGTGCCGGATGACCT | |
| | GCGCGTTCATCAGTATCTGCTCGGTTACGCTTCTGAT | |
| | CTTAACTTCCTGCCGGTAGCTCTACAGCCGCACGGC | |
| | ATCGGTTTTCTCGAACCGGGGATTCAGATTGCCACC | |
| | ATTGACCATTCCATGTGGTTCCATCGCCCGTTTAATT | |
| | TGAATGAATGGCTGCTGTATAGCGTGGAGAGCACCT | |
| | CGGCGTCCAGCGCACGTGGCTTTGTGCGCGGTGAGT | |
| | TTTATACCCAAGACGGCGTACTGGTTGCCTCGACCG | |
| | TTCAGGAAGGGGTGATGCGTAATCACAATtaa | |

[1266] In certain constructs, the butyrate gene cassette (e.g., bcd2-etfB3-etfA3-thiA1-hbd-crt2-pbt buk butyrate cassette (pLogic031), and/or ter-thiA1-hbd-crt2-pbt buk butyrate cassette (pLogic046) and/or ter-thiA1-hbd-crt2-tesb butyrate cassette (pLOGIC046-delta pbt.buk/tesB+)) is placed under the control of an RNS-responsive regulatory region, e.g., norB. In some embodiments, the butyrate gene cassette is placed under the control of an RNS-responsive regulatory region, e.g., norB. and the bacteria further comprises a gene encoding a corresponding RNS-responsive transcription factor, e.g., nsrR (see, e.g., Table 37 and Table 38 and SEQ ID NO: 167).

[1267] Table 37 depicts the nucleic acid sequence of an exemplary RNS-regulated construct comprising a gene encoding nsrR, a regulatory region of norB, and a butyrogenic gene cassette (pLogic031-nsrR-norB-butyrate construct; SEQ ID NO: 165). The sequence encoding NsrR is underlined and bolded, and the NsrR binding site, i.e., a regulatory region of norB is [symbol] Table 38 depicts the nucleic acid sequence of an exemplary RNS-regulated construct comprising a gene encoding nsrR, a regulatory region of norB, and a butyrogenic gene cassette (pLogic046-nsrR-norB-butyrate construct; SEQ ID NO: 166). The sequence encoding NsrR is underlined and bolded, and the NsrR binding site, i.e., a regulatory region of norB is [symbol] .

[1268] Table 39 (SEQ ID NO: 167) depicts the nucleic acid sequence of an exemplary RNS-regulated construct comprising a gene encoding nsrR, a regulatory region of norB, and a butyrogenic gene cassette (pLOGIC046-delta pbt.buk/tesB+-nsrR-norB-butyrate construct (SEQ ID NO: 167).

[1269] In some embodiments, genetically engineered bacteria comprise a nucleic acid sequence that is at least about 80%, at least about 85%, at least about 90%, at least about 95%, or at least about 99% homologous to the DNA sequence of SEQ ID NO: 165, 166, 167, or a functional fragment thereof.

TABLE 37
Nucleotide sequences of pLogic031-nsrR-norB-butyrate construct
Nucleotide sequences of pLogic031-nsrR-norB-butyrate construct

(SEQ ID NO: 165)
ttattatcgcaccgcaatcgggattttcgattcataaagcaggtcgtaggtcggcttgtt
gagcaggtcttgcagcgtgaaaccgtccagatacgtgaaaaacgacttcattgcaccgcc
gagtatgcccgtcagccggcaggacggcgtaatcaggcattcgttgttcgggcccataca
ctcgaccagctgcatcggttcgaggtggcggacgaccgcgccgatattgatgcgttcggg
cggcgcggccagcctcagcccgccgcctttcccgcgtacgctgtgcaagaacccgccttt
gaccagcgcggtaaccactttcatcaaatggcttttggaaatgccgtaggtcgaggcgat
ggtggcgatattgaccagcgcgtcgtcgttgacggcggtgtagatgaggacgcgcagccc
gtagtcggtatgttgggtcagatacatacaacctccttagtacatgcaaaattatttcta
gagcaacatacgagccggaagcataaagtgtaaagcctggggtgcctaatgagttgagtt
gaggaattataacaggaagaaatattcctcatacgcttgtaattcctctatggttgttga

[chemical structure]

aaataattttgtttaactttaagaaggagatatacatatggatttaaattctaaaaaata
tcagatgcttaaagagctatatgtaagcttcgctgaaaatgaagttaaacctttagcaac
agaacttgatgaagaagaaagatttccttatgaaacagtggaaaaaatggcaaaagcagg
aatgatgggtataccatatccaaaagaatatggtggagaaggtggagacactgtaggata
tataatggcagttgaagaattgtctagagtttgtggtactacaggagttatattatcagc
tcatacatctcttggctcatggcctatatatcaatatggtaatgaagaacaaaaacaaaa
attcttaagaccactagcaagtggagaaaaattaggagcatttggtcttactgagcctaa
tgctggtacagatgcgtctggccaacaaacaactgctgttttagacggggatgaatacat
acttaatggctcaaaaatatttataacaaacgcaatagctggtgacatatatgtagtaat
ggcaatgactgataaatctaaggggaacaaaggaatatcagcatttatagttgaaaaagg
aactcctgggtttagctttggagttaaagaaaagaaaatgggtataagaggttcagctac
gagtgaattaatatttgaggattgcagaatacctaaagaaaatttacttggaaaagaagg
tcaaggatttaagatagcaatgtctactcttgatggtggtagaattggtatagctgcaca
agctttaggtttagcacaaggtgctcttgatgaaactgttaaatatgtaaaagaaagagt
acaatttggtagaccattatcaaaattccaaaatacacaattccaattagctgatatgga
agttaaggtacaagcggctagacaccttgtatatcaagcagctataaataaagacttagg
aaaaccttatggagtagaagcagcaatggcaaaattatttgcagctgaaacagctatgga
agttactacaaaagctgtacaacttcatggaggatatggatacactcgtgactatccagt
agaaagaatgatgagagatgctaagataactgaaatatatgaaggaactagtgaagttca
aagaatggttatttcaggaaaactattaaaatagtaagaaggagatatacatatggagga
aggatttatgaatatagtcgtttgtataaaacaagttccagatacaacagaagttaaact
agatcctaatacaggtactttaattagagatggagtaccaagtataataaaccctgatga
taaagcaggtttagaagaagctataaaattaaaagaagaaatgggtgctcatgtaactgt
tataacaatgggacctcctcaagcagatatggctttaaaagaagctttagcaatgggtgc
agatagaggtatattattaacagatagagcatttgcgggtgctgatacttgggcaacttc
atcagcattagcaggagcattaaaaaatatagattttgatattataatagctggaagaca
ggcgatagatggagatactgcacaagttggacctcaaatagctgaacatttaaatcttcc
atcaataacatatgctgaagaaataaaaactgaaggtgaatatgtattagtaaaaagaca
atttgaagattgttgccatgacttaaaagttaaaatgccatgccttataacaactcttaa
agatatgaacacaccaagatacatgaaagttggaagaatatatgatgctttcgaaaatga
tgtagtagaaacatggactgtaaaagatatagaagttgacccttctaatttaggtcttaa
aggttctccaactagtgtatttaaatcatttacaaaatcagttaaaccagctggtacaat
atacaatgaagatgcgaaaacatcagctggaattatcatagataaattaaaagagaagta
tatcatataataagaaggagatatacatatgggtaacgttttagtagtaatagaacaaag
agaaaatgtaattcaaactgtttctttagaattactaggaaaggctacagaaatagcaaa
agattatgatacaaaagtttctgcattacttttaggtagtaaggtagaaggtttaataga
tacattagcacactatggtgcagatgaggtaatagtagtagatgatgaagctttagcagt
gtatacaactgaaccatatacaaaagcagcttatgaagcaataaaagcagctgaccctat
agttgtattatttggtgcaacttcaataggtagagatttagcgcctagagtttctgctag
aatacatacaggtcttactgctgactgtacaggtcttgcagtagctgaagatacaaaatt
attattaatgacaagacctgcctttggtggaaatataatggcaacaatagtttgtaaaga
tttcagacctcaaatgtctacagttagaccaggggttatgaagaaaaatgaacctgatga
aactaaagaagctgtaattaaccgtttcaaggtagaatttaatgatgctgataaattagt
tcaagttgtacaagtaataaaagaagctaaaaaacaagttaaaatagaagatgctaagat
attagtttctgctggacgtggaatgggtggaaaagaaaacttagacatactttatgaatt
agctgaaattataggtggagaagtttctggttctcgtgccactatagatgcaggttggtt
agataaagcaagacaagttggtcaaactggtaaaactgtaagaccagacctttatatagc
atgtggtatatctggagcaatacaacatatagctggtatggaagatgctgagtttatagt
tgctataaataaaaatccagaagctccaatatttaaatatgctgatgttggtatagttgg
agatgttcataaagtgcttccagaacttatcagtcagttaagtgttgcaaaagaaaaagg
tgaagttttagctaactaataagaaggagatatacatatgagagaagtagtaattgccag
tgcagctagaacagcagtaggaagttttggaggagcatttaaatcagtttcagcggtaga
gttaggggtaacagcagctaaagaagctataaaaagagctaacataactccagatatgat
agatgaatctcttttagggggagtacttacagcaggtcttggacaaaatatagcaagaca
aatagcattaggagcaggaataccagtagaaaaaccagctatgactataaatatagtttg
tggttctggattaagatctgtttcaatggcatctcaacttatagcattaggtgatgctga
tataatgttagttggtggagctgaaaacatgagtatgtctccttatttagtaccaagtgc
gagatatggtgcaagaatgggtgatgctgcttttgttgattcaatgataaaagatggatt
atcagacatatttaataactatcacatgggtattactgctgaaaacatagcagagcaatg
gaatataactagagaagaacaagatgaattagctcttgcaagtcaaaataaagctgaaaa
agctcaagctgaaggaaaatttgatgaagaaatagttcctgttgttataaaaggaagaaa
aggtgacactgtagtagataaagatgaatatattaagcctggcactacaatggagaaact
tgctaagttaagacctgcatttaaaaaagatggaacagttactgctggtaatgcatcagg
aataaatgatggtgctgctatgttagtagtaatggctaaagaaaaagctgaagaactagg
aatagagcctcttgcaactatagtttcttatggaacagctggtgttgaccctaaaataat
gggatatggaccagttccagcaactaaaaaagctttagaagctgctaatatgactattga
agatatagatttagttgaagctaatgaggcatttgctgcccaatctgtagctgtaataag
agacttaaatatagatatgaataaagttaatgttaatggtggagcaatagctataggaca
tccaataggatgctcaggagcaagaatacttactacacttttatatgaaatgaagagaag
agatgctaaaactggtcttgctacactttgtataggcggtggaatgggaactactttaat
agttaagagatagtaagaaggagatatacatatgaaattagctgtaataggtagtggaac
tatgggaagtggtattgtacaaacttttgcaagttgtggacatgatgtatgtttaaagag
tagaactcaaggtgctatagataaatgtttagctttattagataaaaatttaactaagtt
agttactaagggaaaaatggatgaagctacaaaagcagaaatattaagtcatgttagttc
aactactaattatgaagatttaaaagatatggatttaataatagaagcatctgtagaaga
catgaatataaagaaagatgttttcaagttactagatgaattatgtaaagaagatactat
cttggcaacaaatacttcatcattatctataacagaaatagcttcttctactaagcgccc
agataaagttataggaatgcatttctttaatccagttcctatgatgaaattagttgaagt
tataagtggtcagttaacatcaaaagttacttttgatacagtatttgaattatctaagag
tatcaataaagtaccagtagatgtatctgaatctcctggatttgtagtaaatagaatact
tatacctatgataaatgaagctgttggtatatatgcagatggtgttgcaagtaaagaaga
aatagatgaagctatgaaattaggagcaaaccatccaatgggaccactagcattaggtga
tttaatcggattagatgttgttttagctataatgaacgttttatatactgaatttggaga
tactaaatatagacctcatccacttttagctaaaatggttagagctaatcaattaggaag
aaaaactaagataggattctatgattataataaataataagaaggagatatacatatgag
tacaagtgatgttaaagtttatgagaatgtagctgttgaagtagatggaaatatatgtac
agtgaaaatgaatagacctaaagcccttaatgcaataaattcaaagactttagaagaact
ttatgaagtatttgtagatattaataatgatgaaactattgatgttgtaatattgacagg
ggaaggaaaggcatttgtagctggagcagatattgcatacatgaaagatttagatgctgt
agctgctaaagattttagtatcttaggagcaaaagcttttggagaaatagaaaatagtaa
aaaagtagtgatagctgctgtaaacggatttgctttaggtggaggatgtgaacttgcaat
ggcatgtgatataagaattgcatctgctaaagctaaatttggtcagccagaagtaactct
tggaataactccaggatatggaggaactcaaaggcttacaagattggttggaatggcaaa
agcaaaagaattaatctttacaggtcaagttataaaagctgatgaagctgaaaaaatagg
gctagtaaatagagtcgttgagccagacattttaatagaagaagttgagaaattagctaa
gataatagctaaaaatgctcagcttgcagttagatactctaaagaagcaatacaacttgg
tgctcaaactgatataaatactggaatagatatagaatctaatttatttggtctttgttt
ttcaactaaagaccaaaaagaaggaatgtcagctttcgttgaaaagagagaagctaactt
tataaaagggtaataagaaggagatatacatatgagaagttttgaagaagtaattaagtt
tgcaaaagaaagaggacctaaaactatatcagtagcatgttgccaagataaagaagtttt
aatggcagttgaaatggctagaaaagaaaaaatagcaaatgccattttagtaggagatat
agaaaagactaaagaaattgcaaaaagcatagacatggatatcgaaaattatgaactgat
agatataaaagatttagcagaagcatctctaaaatctgttgaattagtttcacaaggaaa
agccgacatggtaatgaaaggcttagtagacacatcaataatactaaaagcagttttaaa
taaagaagtaggtcttagaactggaaatgtattaagtcacgtagcagtatttgatgtaga
gggatatgatagattatttttcgtaactgacgcagctatgaacttagctcctgatacaaa
tactaaaaagcaaatcatagaaaatgcttgcacagtagcacattcattagatataagtga
accaaaagttgctgcaatatgcgcaaaagaaaaagtaaatccaaaaatgaaagatacagt
tgaagctaaagaactagaagaaatgtatgaaagaggagaaatcaaaggttgtatggttgg
tgggccttttgcaattgataatgcagtatctttagaagcagctaaacataaaggtataaa
tcatcctgtagcaggacgagctgatatattattagccccagatattgaaggtggtaacat
attatataaagctttggtattcttctcaaaatcaaaaaatgcaggagttatagttggggc
taaagcaccaataatattaacttctagagcagacagtgaagaaactaaactaaactcaat
agctttaggtgttttaatggcagcaaaggcataataagaaggagatatacatatgagcaa
aatatttaaaatcttaacaataaatcctggttcgacatcaactaaaatagctgtatttga
taatgaggatttagtatttgaaaaaactttaagacattcttcagaagaaataggaaaata
tgagaaggtgtctgaccaatttgaatttcgtaaacaagtaatagaagaagctctaaaaga
aggtggagtaaaaacatctgaattagatgctgtagtaggtagaggaggacttcttaaacc
tataaaaggtggtacttattcagtaagtgctgctatgattgaagatttaaaagtgggagt
tttaggagaacacgcttcaaacctaggtggaataatagcaaaacaaataggtgaagaagt
aaatgttccttcatacatagtagaccctgttgttgtagatgaattagaagatgttgctag
aatttctggtatgcctgaaataagtagagcaagtgtagtacatgctttaaatcaaaaggc
aatagcaagaagatatgctagagaaataaacaagaaatatgaagatataaatcttatagt
tgcacacatgggtggaggagtttctgttggagctcataaaaatggtaaaatagtagatgt
tgcaaacgcattagatggagaaggacctttctctccagaaagaagtggtggactaccagt
aggtgcattagtaaaaatgtgctttagtggaaaatatactcaagatgaaattaaaaagaa
aataaaaggtaatggcggactagttgcatacttaaacactaatgatgctagagaagttga
agaaagaattgaagctggtgatgaaaaagctaaattagtatatgaagctatggcatatca
aatctctaaagaaataggagctagtgctgcagttcttaagggagatgtaaaagcaatatt
attaactggtggaatcgcatattcaaaaatgtttacagaaatgattgcagatagagttaa
atttatagcagatgtaaaagtttatccaggtgaagatgaaatgattgcattagctcaagg
tggacttagagttttaactggtgaagaagaggctcaagtttatgataactaataa

TABLE 38
pLogic046-nsrR-norB-butyrate construct
Nucleotide sequences of pLogic046-nsrR-norB-butyrate construct

(SEQ ID NO: 166)
ttattatcgcaccgcaatcgggattttcgattcataaagcaggtcgtaggtcggcttgtt
gagcaggtcttgcagcgtgaaaccgtccagatacgtgaaaaacgacttcattgcaccgcc
gagtatgcccgtcagccggcaggacggcgtaatcaggcattcgttgttcgggcccataca
ctcgaccagctgcatcggttcgaggtggcggacgaccgcgccgatattgatgcgttcggg
cggcgcggccagcctcagcccgccgcctttcccgcgtacgctgtgcaagaacccgccttt
gaccagcgcggtaaccactttcatcaaatggcttttggaaatgccgtaggtcgaggcgat
ggtggcgatattgaccagcgcgtcgtcgttgacggcggtgtagatgaggacgcgcagccc
gtagtcggtatgttgggtcagatacatacaacctccttagtacatgcaaaattatttcta
gagcaacatacgagccggaagcataaagtgtaaagcctggggtgcctaatgagttgagtt
gaggaattataacaggaagaaatattcctcatacgcttgtaattcctctatggttgttga

[chemical structure]

aaataattttgtttaactttaagaaggagatatacatatgatcgtaaaacctatggtacg
caacaatatctgcctgaacgcccatcctcagggctgcaagaagggagtggaagatcagat
tgaatataccaagaaacgcattaccgcagaagtcaaagctggcgcaaaagctccaaaaaa
cgttctggtgcttggctgctcaaatggttacggcctggcgagccgcattactgctgcgtt
cggatacggggctgcgaccatcggcgtgtcctttgaaaaagcgggttcagaaaccaaata
tggtacaccgggatggtacaataatttggcatttgatgaagcggcaaaacgcgagggtct
ttatagcgtgacgatcgacggcgatgcgttttcagacgagatcaaggcccaggtaattga
ggaagccaaaaaaaaaggtatcaaatttgatctgatcgtatacagcttggccagcccagt
acgtactgatcctgatacaggtatcatgcacaaaagcgttttgaaaccctttggaaaaac
gttcacaggcaaaacagtagatccgtttactggcgagctgaaggaaatctccgcggaacc
agcaaatgacgaggaagcagccgccactgttaaagttatggggggtgaagattgggaacg
ttggattaagcagctgtcgaaggaaggcctcttagaagaaggctgtattaccttggccta
tagttatattggccctgaagctacccaagctttgtaccgtaaaggcacaatcggcaaggc
caaagaacacctggaggccacagcacaccgtctcaacaaagagaacccgtcaatccgtgc
cttcgtgagcgtgaataaaggcctggtaacccgcgcaagcgccgtaatcccggtaatccc
tctgtatctcgccagcttgttcaaagtaatgaaagagaagggcaatcatgaaggttgtat
tgaacagatcacgcgtctgtacgccgagcgcctgtaccgtaaagatggtacaattccagt
tgatgaggaaaatcgcattcgcattgatgattgggagttagaagaagacgtccagaaagc
ggtatccgcgttgatggagaaagtcacgggtgaaaacgcagaatctctcactgacttagc
ggggtaccgccatgatttcttagctagtaacggctttgatgtagaaggtattaattatga
agcggaagttgaacgcttcgaccgtatctgataagaaggagatatacatatgagagaagt
agtaattgccagtgcagctagaacagcagtaggaagttttggaggagcatttaaatcagt
ttcagcggtagagttaggggtaacagcagctaaagaagctataaaaagagctaacataac
tccagatatgatagatgaatctcttttagggggagtacttacagcaggtcttggacaaaa
tatagcaagacaaatagcattaggagcaggaataccagtagaaaaaccagctatgactat
aaatatagtttgtggttctggattaagatctgtttcaatggcatctcaacttatagcatt
aggtgatgctgatataatgttagttggtggagctgaaaacatgagtatgtctccttattt
agtaccaagtgcgagatatggtgcaagaatgggtgatgctgcttttgttgattcaatgat
aaaagatggattatcagacatatttaataactatcacatgggtattactgctgaaaacat
agcagagcaatggaatataactagagaagaacaagatgaattagctcttgcaagtcaaaa
taaagctgaaaaagctcaagctgaaggaaaatttgatgaagaaatagttcctgttgttat
aaaaggaagaaaaggtgacactgtagtagataaagatgaatatattaagcctggcactac
aatggagaaacttgctaagttaagacctgcatttaaaaaagatggaacagttactgctgg
taatgcatcaggaataaatgatggtgctgctatgttagtagtaatggctaaagaaaaagc
tgaagaactaggaatagagcctcttgcaactatagtttcttatggaacagctggtgttga
ccctaaaataatgggatatggaccagttccagcaactaaaaaagctttagaagctgctaa
tatgactattgaagatatagatttagttgaagctaatgaggcatttgctgcccaatctgt
agctgtaataagagacttaaatatagatatgaataaagttaatgttaatggtggagcaat
agctataggacatccaataggatgctcaggagcaagaatacttactacacttttatatga
aatgaagagaagagatgctaaaactggtcttgctacactttgtataggcggtggaatggg
aactactttaatagttaagagatagtaagaaggagatatacatatgaaattagctgtaat
aggtagtggaactatgggaagtggtattgtacaaacttttgcaagttgtggacatgatgt
atgtttaaagagtagaactcaaggtgctatagataaatgtttagctttattagataaaaa
tttaactaagttagttactaagggaaaaatggatgaagctacaaaagcagaaatattaag
tcatgttagttcaactactaattatgaagatttaaaagatatggatttaataatagaagc
atctgtagaagacatgaatataaagaaagatgttttcaagttactagatgaattatgtaa
agaagatactatcttggcaacaaatacttcatcattatctataacagaaatagcttcttc
tactaagcgcccagataaagttataggaatgcatttctttaatccagttcctatgatgaa
attagttgaagttataagtggtcagttaacatcaaaagttacttttgatacagtatttga
attatctaagagtatcaataaagtaccagtagatgtatctgaatctcctggatttgtagt
aaatagaatacttatacctatgataaatgaagctgttggtatatatgcagatggtgttgc
aagtaaagaagaaatagatgaagctatgaaattaggagcaaaccatccaatgggaccact
agcattaggtgatttaatcggattagatgttgttttagctataatgaacgttttatatac
tgaatttggagatactaaatatagacctcatccacttttagctaaaatggttagagctaa
tcaattaggaagaaaaactaagataggattctatgattataataaataataagaaggaga
tatacatatgagtacaagtgatgttaaagtttatgagaatgtagctgttgaagtagatgg
aaatatatgtacagtgaaaatgaatagacctaaagcccttaatgcaataaattcaaagac
tttagaagaactttatgaagtatttgtagatattaataatgatgaaactattgatgttgt
aatattgacaggggaaggaaaggcatttgtagctggagcagatattgcatacatgaaaga
tttagatgctgtagctgctaaagattttagtatcttaggagcaaaagcttttggagaaat
agaaaatagtaaaaaagtagtgatagctgctgtaaacggatttgctttaggtggaggatg
tgaacttgcaatggcatgtgatataagaattgcatctgctaaagctaaatttggtcagcc
agaagtaactcttggaataactccaggatatggaggaactcaaaggcttacaagattggt
tggaatggcaaaagcaaaagaattaatctttacaggtcaagttataaaagctgatgaagc
tgaaaaaatagggctagtaaatagagtcgttgagccagacattttaatagaagaagttga
gaaattagctaagataatagctaaaaatgctcagcttgcagttagatactctaaagaagc
aatacaacttggtgctcaaactgatataaatactggaatagatatagaatctaatttatt
tggtctttgtttttcaactaaagaccaaaaagaaggaatgtcagctttcgttgaaaagag
agaagctaactttataaaagggtaataagaaggagatatacatatgagaagttttgaaga
agtaattaagtttgcaaaagaaagaggacctaaaactatatcagtagcatgttgccaaga
taaagaagttttaatggcagttgaaatggctagaaaagaaaaaatagcaaatgccatttt
agtaggagatatagaaaagactaaagaaattgcaaaaagcatagacatggatatcgaaaa
ttatgaactgatagatataaaagatttagcagaagcatctctaaaatctgttgaattagt
ttcacaaggaaaagccgacatggtaatgaaaggcttagtagacacatcaataatactaaa
agcagttttaaataaagaagtaggtcttagaactggaaatgtattaagtcacgtagcagt
atttgatgtagagggatatgatagattatttttcgtaactgacgcagctatgaacttagc
tcctgatacaaatactaaaaagcaaatcatagaaaatgcttgcacagtagcacattcatt
agatataagtgaaccaaaagttgctgcaatatgcgcaaaagaaaaagtaaatccaaaaat
gaaagatacagttgaagctaaagaactagaagaaatgtatgaaagaggagaaatcaaagg
ttgtatggttggtgggccttttgcaattgataatgcagtatctttagaagcagctaaaca
taaaggtataaatcatcctgtagcaggacgagctgatatattattagccccagatattga
aggtggtaacatattatataaagctttggtattcttctcaaaatcaaaaaatgcaggagt
tatagttggggctaaagcaccaataatattaacttctagagcagacagtgaagaaactaa
actaaactcaatagctttaggtgttttaatggcagcaaaggcataataagaaggagatat
acatatgagcaaaatatttaaaatcttaacaataaatcctggttcgacatcaactaaaat
agctgtatttgataatgaggatttagtatttgaaaaaactttaagacattcttcagaaga
aataggaaaatatgagaaggtgtctgaccaatttgaatttcgtaaacaagtaatagaaga
agctctaaaagaaggtggagtaaaaacatctgaattagatgctgtagtaggtagaggagg
acttcttaaacctataaaaggtggtacttattcagtaagtgctgctatgattgaagattt
aaaagtgggagttttaggagaacacgcttcaaacctaggtggaataatagcaaaacaaat
aggtgaagaagtaaatgttccttcatacatagtagaccctgttgttgtagatgaattaga
agatgttgctagaatttctggtatgcctgaaataagtagagcaagtgtagtacatgcttt
aaatcaaaaggcaatagcaagaagatatgctagagaaataaacaagaaatatgaagatat
aaatcttatagttgcacacatgggtggaggagtttctgttggagctcataaaaatggtaa
aatagtagatgttgcaaacgcattagatggagaaggacctttctctccagaaagaagtgg
tggactaccagtaggtgcattagtaaaaatgtgctttagtggaaaatatactcaagatga
aattaaaaagaaaataaaaggtaatggcggactagttgcatacttaaacactaatgatgc
tagagaagttgaagaaagaattgaagctggtgatgaaaaagctaaattagtatatgaagc
tatggcatatcaaatctctaaagaaataggagctagtgctgcagttcttaagggagatgt
aaaagcaatattattaactggtggaatcgcatattcaaaaatgtttacagaaatgattgc
agatagagttaaatttatagcagatgtaaaagtttatccaggtgaagatgaaatgattgc
attagctcaaggtggacttagagttttaactggtgaagaagaggctcaagtttatgataa
ctaataa

TABLE 39
pLOGIC046-delta pbt.buk/tesB+
-nsrR-norB-butyrate construct
pLOGIC046-delta pbt.buk/tesB+30-nsrR-norB-
butyrate construct SEQ ID NO: 167

ttattatcgcaccgcaatcgggattttcgattcataaagcaggtcgtag
gtcggcttgttgagcaggtcttgcagcgtgaaaccgtccagatacgtga
aaaacgacttcattgcaccgccgagtatgcccgtcagccggcaggacgg
cgtaatcaggcattcgttgttcgggcccatacactcgaccagctgcatc
ggttcgaggtggcggacgaccgcgccgatattgatgcgttcgggcggcg
cggccagcctcagcccgccgcctttcccgcgtacgctgtgcaagaaccc
gcctttgaccagcgcggtaaccactttcatcaaatggcttttggaaatg
ccgtaggtcgaggcgatggtggcgatattgaccagcgcgtcgtcgttga
cggcggtgtagatgaggacgcgcagcccgtagtcggtatgttgggtcag
atacatacaacctccttagtacatgcaaaattatttctagagcaacata
cgagccggaagcataaagtgtaaagcctggggtgcctaatgagttgagt
tgaggaattataacaggaagaaatattcctcatacgcttgtaattcctc
tatggttgttgacaattaatcatcggctcgtataatgtataacattcat
attttgtgaattttaaactctagaaataattttgtttaactttaagaag
gagatatacatatgatcgtaaaacctatggtacgcaacaatatctgcct
gaacgcccatcctcagggctgcaagaagggagtggaagatcagattgaa
tataccaagaaacgcattaccgcagaagtcaaagctggcgcaaaagctc
caaaaaacgttctggtgcttggctgctcaaatggttacggcctggcgag
ccgcattactgctgcgttcggatacggggctgcgaccatcggcgtgtcc
tttgaaaaagcgggttcagaaaccaaatatggtacaccgggatggtaca
ataatttggcatttgatgaagcggcaaaacgcgagggtctttatagcgt
gacgatcgacggcgatgcgttttcagacgagatcaaggcccaggtaatt
gaggaagccaaaaaaaaaggtatcaaatttgatctgatcgtatacagct
tggccagcccagtacgtactgatcctgatacaggtatcatgcacaaaag
cgttttgaaaccctttggaaaaacgttcacaggcaaaacagtagatccg
tttactggcgagctgaaggaaatctccgcggaaccagcaaatgacgagg
aagcagccgccactgttaaagttatggggggtgaagattgggaacgttg
gattaagcagctgtcgaaggaaggcctcttagaagaaggctgtattacc
ttggcctatagttatattggccctgaagctacccaagctttgtaccgta
aaggcacaatcggcaaggccaaagaacacctggaggccacagcacaccg
tctcaacaaagagaacccgtcaatccgtgccttcgtgagcgtgaataaa
ggcctggtaacccgcgcaagcgccgtaatcccggtaatccctctgtatc
tcgccagcttgttcaaagtaatgaaagagaagggcaatcatgaaggttg
tattgaacagatcacgcgtctgtacgccgagcgcctgtaccgtaaagat
ggtacaattccagttgatgaggaaaatcgcattcgcattgatgattggg
agttagaagaagacgtccagaaagcggtatccgcgttgatggagaaagt
cacgggtgaaaacgcagaatctctcactgacttagcggggtaccgccat
gatttcttagctagtaacggctttgatgtagaaggtattaattatgaag
cggaagttgaacgcttcgaccgtatctgataagaaggagatatacatat
gagagaagtagtaattgccagtgcagctagaacagcagtaggaagtttt
ggaggagcatttaaatcagtttcagcggtagagttaggggtaacagcag
ctaaagaagctataaaaagagctaacataactccagatatgatagatga
atctcttttagggggagtacttacagcaggtcttggacaaaatatagca
agacaaatagcattaggagcaggaataccagtagaaaaaccagctatga
ctataaatatagtttgtggttctggattaagatctgtttcaatggcatc
tcaacttatagcattaggtgatgctgatataatgttagttggtggagct
gaaaacatgagtatgtctccttatttagtaccaagtgcgagatatggtg
caagaatgggtgatgctgcttttgttgattcaatgataaaagatggatt
atcagacatatttaataactatcacatgggtattactgctgaaaacata
gcagagcaatggaatataactagagaagaacaagatgaattagctcttg
caagtcaaaataaagctgaaaaagctcaagctgaaggaaaatttgatga
agaaatagttcctgttgttataaaaggaagaaaaggtgacactgtagta
gataaagatgaatatattaagcctggcactacaatggagaaacttgcta
agttaagacctgcatttaaaaaagatggaacagttactgctggtaatgc
atcaggaataaatgatggtgctgctatgttagtagtaatggctaaagaa
aaagctgaagaactaggaatagagcctcttgcaactatagtttcttatg
gaacagctggtgttgaccctaaaataatgggatatggaccagttccagc
aactaaaaaagctttagaagctgctaatatgactattgaagatatagat
ttagttgaagctaatgaggcatttgctgcccaatctgtagctgtaataa
gagacttaaatatagatatgaataaagttaatgttaatggtggagcaat
agctataggacatccaataggatgctcaggagcaagaatacttactaca
cttttatatgaaatgaagagaagagatgctaaaactggtcttgctacac
tttgtataggcggtggaatgggaactactttaatagttaagagatagta
agaaggagatatacatatgaaattagctgtaataggtagtggaactatg
ggaagtggtattgtacaaacttttgcaagttgtggacatgatgtatgtt
taaagagtagaactcaaggtgctatagataaatgtttagctttattaga
taaaaatttaactaagttagttactaagggaaaaatggatgaagctaca
aaagcagaaatattaagtcatgttagttcaactactaattatgaagatt
taaaagatatggatttaataatagaagcatctgtagaagacatgaatat
aaagaaagatgttttcaagttactagatgaattatgtaaagaagatact
atcttggcaacaaatacttcatcattatctataacagaaatagcttctt
ctactaagcgcccagataaagttataggaatgcatttctttaatccagt
tcctatgatgaaattagttgaagttataagtggtcagttaacatcaaaa
gttacttttgatacagtatttgaattatctaagagtatcaataaagtac
cagtagatgtatctgaatctcctggatttgtagtaaatagaatacttat
acctatgataaatgaagctgttggtatatatgcagatggtgttgcaagt
aaagaagaaatagatgaagctatgaaattaggagcaaaccatccaatgg
gaccactagcattaggtgatttaatcggattagatgttgttttagctat
aatgaacgttttatatactgaatttggagatactaaatatagacctcat
ccacttttagctaaaatggttagagctaatcaattaggaagaaaaacta
agataggattctatgattataataaataataagaaggagatatacatat
gagtacaagtgatgttaaagtttatgagaatgtagctgttgaagtagat
ggaaatatatgtacagtgaaaatgaatagacctaaagcccttaatgcaa
taaattcaaagactttagaagaactttatgaagtatttgtagatattaa
taatgatgaaactattgatgttgtaatattgacaggggaaggaaaggca
tttgtagctggagcagatattgcatacatgaaagatttagatgctgtag
ctgctaaagattttagtatcttaggagcaaaagcttttggagaaataga
aaatagtaaaaaagtagtgatagctgctgtaaacggatttgctttaggt
ggaggatgtgaacttgcaatggcatgtgatataagaattgcatctgcta
aagctaaatttggtcagccagaagtaactcttggaataactccaggata
tggaggaactcaaaggcttacaagattggttggaatggcaaaagcaaaa
gaattaatctttacaggtcaagttataaaagctgatgaagctgaaaaaa
tagggctagtaaatagagtcgttgagccagacattttaatagaagaagt
tgagaaattagctaagataatagctaaaaatgctcagcttgcagttaga
tactctaaagaagcaatacaacttggtgctcaaactgatataaatactg
gaatagatatagaatctaatttatttggtctttgtttttcaactaaaga
ccaaaaagaaggaatgtcagctttcgttgaaaagagagaagctaacttt
ataaaagggtaataagaaggagatatacatatgAGTCAGGCGCTAAAAA
ATTTACTGACATTGTTAAATCTGGAAAAAATTGAGGAAGGACTCTTTCG
CGGCCAGAGTGAAGATTTAGGTTTACGCCAGGTGTTTGGCGGCCAGGTC
GTGGGTCAGGCCTTGTATGCTGCAAAAGAGACCGTCCCTGAAGAGCGGC
TGGTACATTCGTTTCACAGCTACTTTCTTCGCCCTGGCGATAGTAAGAA
GCCGATTATTTATGATGTCGAAACGCTGCGTGACGGTAACAGCTTCAGC
GCCCGCCGGGTTGCTGCTATTCAAAACGGCAAACCGATTTTTTATATGA
CTGCCTCTTTCCAGGCACCAGAAGCGGGTTTCGAACATCAAAAAACAAT
GCCGTCCGCGCCAGCGCCTGATGGCCTCCCTTCGGAAACGCAAATCGCC
CAATCGCTGGCGCACCTGCTGCCGCCAGTGCTGAAAGATAAATTCATCT
GCGATCGTCCGCTGGAAGTCCGTCCGGTGGAGTTTCATAACCCACTGAA
AGGTCACGTCGCAGAACCACATCGTCAGGTGTGGATCCGCGCAAATGGT
AGCGTGCCGGATGACCTGCGCGTTCATCAGTATCTGCTCGGTTACGCTT
CTGATCTTAACTTCCTGCCGGTAGCTCTACAGCCGCACGGCATCGGTTT
TCTCGAACCGGGGATTCAGATTGCCACCATTGACCATTCCATGTGGTTC
CATCGCCCGTTTAATTTGAATGAATGGCTGCTGTATAGCGTGGAGAGCA
CCTCGGCGTCCAGCGCACGTGGCTTTGTGCGCGGTGAGTTTTATACCCA
AGACGGCGTACTGGTTGCCTCGACCGTTCAGGAAGGGGTGATGCGTAAT
CACAATtaa

[1270] In certain constructs, the butyrate gene cassette (e.g., bcd2-etfB3-etfA3-thiA1-hbd-crt2-pbt buk butyrate cassette (pLogic031), and/or ter-thiA1-hbd-crt2-pbt buk butyrate cassette (pLogic046) and/or ter-thiA1-hbd-crt2-tesb butyrate cassette (pLOGIC046-delta pbt.buk/tesB+)) is placed under the control of an ROS-responsive regulatory region, e.g., oxyS. In certain constructs, the butyrate gene cassette (e.g., bcd2-etfB3-etfA3-thiA1-hbd-crt2-pbt buk butyrate cassette (pLogic031), and/or ter-thiA1-hbd-crt2-pbt buk butyrate cassette (pLogic046) and/or ter-thiA1-hbd-crt2-tesb butyrate cassette (pLOGIC046-delta pbt.buk/tesB+)) is placed under the control of an ROS-responsive regulatory region, e.g., oxyS, and the bacteria further comprises a gene encoding a corresponding ROS-responsive transcription factor, e.g., oxyR (see, e.g., the tables and elsewhere herein).

[1271] Nucleic acid sequences of exemplary ROS-regulated constructs comprising an oxyS promoter are shown in Table 40 and Table 41 and Table 43. The nucleic acid sequence of an exemplary construct encoding OxyR is shown in Table 42. Table 40 depicts the nucleic acid sequence of an exemplary ROS-regulated construct comprising an oxyS promoter and a butyrogenic gene cassette (pLogic031-oxyS-butyrate construct; SEQ ID NO: 168). Table 41 depicts the nucleic acid sequence of an exemplary ROS-regulated construct comprising an oxyS promoter and a butyrogenic gene cassette (pLogic046-oxyS-butyrate construct; SEQ ID NO: 169). Table 42 depicts the nucleic acid sequence of an exemplary construct encoding OxyR (pZA22-oxyR construct; SEQ ID NO: 170). Table 43 depicts the nucleic acid sequence of an exemplary ROS-regulated construct comprising an oxyS promoter and a butyrogenic gene cassette (pLOGIC046-delta pbt.buk/tesB+-oxyS-butyrate construct; SEQ ID NO: 171).

[1272] In some embodiments, genetically engineered bacteria comprise a nucleic acid sequence that is at least about 80%, at least about 85%, at least about 90%, at least about 95%, or at least about 99% homologous to the DNA sequence of SEQ ID NO: 168, 169, 170, or 171, or a functional fragment thereof.

TABLE 40
pLogic031-oxyS-butyrate
construct (SEQ ID NO: 168)
Nucleotide sequences of pLogic031-oxyS-
butyrate construct (SEQ ID NO: 168)

ctcgagttcattatccatcctccatcgccacgatagttcatggcgatag
gtagaatagcaatgaacgattatccctatcaagcattctgactgataat
tgctcacacgaattcattaaagaggagaaaggtaccatggatttaaatt
ctaaaaaatatcagatgcttaaagagctatatgtaagcttcgctgaaaa
tgaagttaaacctttagcaacagaacttgatgaagaagaaagatttcct
tatgaaacagtggaaaaaatggcaaaagcaggaatgatgggtataccat
atccaaaagaatatggtggagaaggtggagacactgtaggatatataat
ggcagttgaagaattgtctagagtttgtggtactacaggagttatatta
tcagctcatacatctcttggctcatggcctatatatcaatatggtaatg
aagaacaaaaacaaaaattcttaagaccactagcaagtggagaaaaatt
aggagcatttggtcttactgagcctaatgctggtacagatgcgtctggc
caacaaacaactgctgttttagacggggatgaatacatacttaatggct
caaaaatatttataacaaacgcaatagctggtgacatatatgtagtaat
ggcaatgactgataaatctaaggggaacaaaggaatatcagcatttata
gttgaaaaaggaactcctgggtttagctttggagttaaagaaaagaaaa
tgggtataagaggttcagctacgagtgaattaatatttgaggattgcag
aatacctaaagaaaatttacttggaaaagaaggtcaaggatttaagata
gcaatgtctactcttgatggtggtagaattggtatagctgcacaagctt
taggtttagcacaaggtgctcttgatgaaactgttaaatatgtaaaaga
aagagtacaatttggtagaccattatcaaaattccaaaatacacaattc
caattagctgatatggaagttaaggtacaagcggctagacaccttgtat
atcaagcagctataaataaagacttaggaaaaccttatggagtagaagc
agcaatggcaaaattatttgcagctgaaacagctatggaagttactaca
aaagctgtacaacttcatggaggatatggatacactcgtgactatccag
tagaaagaatgatgagagatgctaagataactgaaatatatgaaggaac
tagtgaagttcaaagaatggttatttcaggaaaactattaaaatagtaa
gaaggagatatacatatggaggaaggatttatgaatatagtcgtttgta
taaaacaagttccagatacaacagaagttaaactagatcctaatacagg
tactttaattagagatggagtaccaagtataataaaccctgatgataaa
gcaggtttagaagaagctataaaattaaaagaagaaatgggtgctcatg
taactgttataacaatgggacctcctcaagcagatatggctttaaaaga
agctttagcaatgggtgcagatagaggtatattattaacagatagagca
tttgcgggtgctgatacttgggcaacttcatcagcattagcaggagcat
taaaaaatatagattttgatattataatagctggaagacaggcgataga
tggagatactgcacaagttggacctcaaatagctgaacatttaaatctt
ccatcaataacatatgctgaagaaataaaaactgaaggtgaatatgtat
tagtaaaaagacaatttgaagattgttgccatgacttaaaagttaaaat
gccatgccttataacaactcttaaagatatgaacacaccaagatacatg
aaagttggaagaatatatgatgctttcgaaaatgatgtagtagaaacat
ggactgtaaaagatatagaagttgacccttctaatttaggtcttaaagg
ttctccaactagtgtatttaaatcatttacaaaatcagttaaaccagct
ggtacaatatacaatgaagatgcgaaaacatcagctggaattatcatag
ataaattaaaagagaagtatatcatataataagaaggagatatacatat
gggtaacgttttagtagtaatagaacaaagagaaaatgtaattcaaact
gtttctttagaattactaggaaaggctacagaaatagcaaaagattatg
atacaaaagtttctgcattacttttaggtagtaaggtagaaggtttaat
agatacattagcacactatggtgcagatgaggtaatagtagtagatgat
gaagctttagcagtgtatacaactgaaccatatacaaaagcagcttatg
aagcaataaaagcagctgaccctatagttgtattatttggtgcaacttc
aataggtagagatttagcgcctagagtttctgctagaatacatacaggt
cttactgctgactgtacaggtcttgcagtagctgaagatacaaaattat
tattaatgacaagacctgcctttggtggaaatataatggcaacaatagt
ttgtaaagatttcagacctcaaatgtctacagttagaccaggggttatg
aagaaaaatgaacctgatgaaactaaagaagctgtaattaaccgtttca
aggtagaatttaatgatgctgataaattagttcaagttgtacaagtaat
aaaagaagctaaaaaacaagttaaaatagaagatgctaagatattagtt
tctgctggacgtggaatgggtggaaaagaaaacttagacatactttatg
aattagctgaaattataggtggagaagtttctggttctcgtgccactat
agatgcaggttggttagataaagcaagacaagttggtcaaactggtaaa
actgtaagaccagacctttatatagcatgtggtatatctggagcaatac
aacatatagctggtatggaagatgctgagtttatagttgctataaataa
aaatccagaagctccaatatttaaatatgctgatgttggtatagttgga
gatgttcataaagtgcttccagaacttatcagtcagttaagtgttgcaa
aagaaaaaggtgaagttttagctaactaataagaaggagatatacatat
gagagaagtagtaattgccagtgcagctagaacagcagtaggaagtttt
ggaggagcatttaaatcagtttcagcggtagagttaggggtaacagcag
ctaaagaagctataaaaagagctaacataactccagatatgatagatga
atctcttttagggggagtacttacaggaggtcttggacaaaatatagca
agacaaatagcattaggaggaggaataccagtagaaaaaccagctatga
ctataaatatagtttgtggttctggattaagatctgtttcaatggcatc
tcaacttatagcattaggtgatgctgatataatgttagttggtggagct
gaaaacatgagtatgtctccttatttagtaccaagtgcgagatatggtg
caagaatgggtgatgctgcttttgttgattcaatgataaaagatggatt
atcagacatatttaataactatcacatgggtattactgctgaaaacata
gcagagcaatggaatataactagagaagaacaagatgaattagctcttg
caagtcaaaataaagctgaaaaagctcaagctgaaggaaaatttgatga
agaaatagttcctgttgttataaaaggaagaaaaggtgacactgtagta
gataaagatgaatatattaagcctggcactacaatggagaaacttgcta
agttaagacctgcatttaaaaaagatggaacagttactgctggtaatgc
atcaggaataaatgatggtgctgctatgttagtagtaatggctaaagaa
aaagctgaagaactaggaatagagcctcttgcaactatagtttcttatg
gaacagctggtgttgaccctaaaataatgggatatggaccagttccagc
aactaaaaaagctttagaagctgctaatatgactattgaagatatagat
ttagttgaagctaatgaggcatttgctgcccaatctgtagctgtaataa
gagacttaaatatagatatgaataaagttaatgttaatggtggagcaat
agctataggacatccaataggatgctcaggagcaagaatacttactaca
cttttatatgaaatgaagagaagagatgctaaaactggtcttgctacac
tttgtataggcggtggaatgggaactactttaatagttaagagatagta
agaaggagatatacatatgaaattagctgtaataggtagtggaactatg
ggaagtggtattgtacaaacttttgcaagttgtggacatgatgtatgtt
taaagagtagaactcaaggtgctatagataaatgtttagctttattaga
taaaaatttaactaagttagttactaagggaaaaatggatgaagctaca
aaagcagaaatattaagtcatgttagttcaactactaattatgaagatt
taaaagatatggatttaataatagaagcatctgtagaagacatgaatat
aaagaaagatgttttcaagttactagatgaattatgtaaagaagatact
atcttggcaacaaatacttcatcattatctataacagaaatagcttctt
ctactaagcgcccagataaagttataggaatgcatttctttaatccagt
tcctatgatgaaattagttgaagttataagtggtcagttaacatcaaaa
gttacttttgatacagtatttgaattatctaagagtatcaataaagtac
cagtagatgtatctgaatctcctggatttgtagtaaatagaatacttat
acctatgataaatgaagctgttggtatatatgcagatggtgttgcaagt
aaagaagaaatagatgaagctatgaaattaggagcaaaccatccaatgg
gaccactagcattaggtgatttaatcggattagatgttgttttagctat
aatgaacgttttatatactgaatttggagatactaaatatagacctcat
ccacttttagctaaaatggttagagctaatcaattaggaagaaaaacta
agataggattctatgattataataaataataagaaggagatatacatat
gagtacaagtgatgttaaagtttatgagaatgtagctgttgaagtagat
ggaaatatatgtacagtgaaaatgaatagacctaaagcccttaatgcaa
taaattcaaagactttagaagaactttatgaagtatttgtagatattaa
taatgatgaaactattgatgttgtaatattgacaggggaaggaaaggca
tttgtagctggaggagatattgcatacatgaaagatttagatgctgtag
ctgctaaagattttagtatcttaggagcaaaagcttttggagaaataga
aaatagtaaaaaagtagtgatagctgctgtaaacggatttgctttaggt
ggaggatgtgaacttgcaatggcatgtgatataagaattgcatctgcta
aagctaaatttggtcagccagaagtaactcttggaataactccaggata
tggaggaactcaaaggcttacaagattggttggaatggcaaaagcaaaa
gaattaatctttacaggtcaagttataaaagctgatgaagctgaaaaaa
tagggctagtaaatagagtcgttgagccagacattttaatagaagaagt
tgagaaattagctaagataatagctaaaaatgctcagcttgcagttaga
tactctaaagaagcaatacaacttggtgctcaaactgatataaatactg
gaatagatatagaatctaatttatttggtctttgtttttcaactaaaga
ccaaaaagaaggaatgtcagctttcgttgaaaagagagaagctaacttt
ataaaagggtaataagaaggagatatacatatgagaagttttgaagaag
taattaagtttgcaaaagaaagaggacctaaaactatatcagtagcatg
ttgccaagataaagaagttttaatggcagttgaaatggctagaaaagaa
aaaatagcaaatgccattttagtaggagatatagaaaagactaaagaaa
ttgcaaaaagcatagacatggatatcgaaaattatgaactgatagatat
aaaagatttagcagaagcatctctaaaatctgttgaattagtttcacaa
ggaaaagccgacatggtaatgaaaggcttagtagacacatcaataatac
taaaagcagttttaaataaagaagtaggtcttagaactggaaatgtatt
aagtcacgtagcagtatttgatgtagagggatatgatagattatttttc
gtaactgacgcagctatgaacttagctcctgatacaaatactaaaaagc
aaatcatagaaaatgcttgcacagtagcacattcattagatataagtga
accaaaagttgctgcaatatgcgcaaaagaaaaagtaaatccaaaaatg
aaagatacagttgaagctaaagaactagaagaaatgtatgaaagaggag
aaatcaaaggttgtatggttggtgggccttttgcaattgataatgcagt
atctttagaagcagctaaacataaaggtataaatcatcctgtagcagga
cgagctgatatattattagccccagatattgaaggtggtaacatattat
ataaagctttggtattcttctcaaaatcaaaaaatgcaggagttatagt
tggggctaaagcaccaataatattaacttctagagcagacagtgaagaa
actaaactaaactcaatagctttaggtgttttaatggcagcaaaggcat
aataagaaggagatatacatatgagcaaaatatttaaaatcttaacaat
aaatcctggttcgacatcaactaaaatagctgtatttgataatgaggat
ttagtatttgaaaaaactttaagacattcttcagaagaaataggaaaat
atgagaaggtgtctgaccaatttgaatttcgtaaacaagtaatagaaga
agctctaaaagaaggtggagtaaaaacatctgaattagatgctgtagta
ggtagaggaggacttcttaaacctataaaaggtggtacttattcagtaa
gtgctgctatgattgaagatttaaaagtgggagttttaggagaacacgc
ttcaaacctaggtggaataatagcaaaacaaataggtgaagaagtaaat
gttccttcatacatagtagaccctgttgttgtagatgaattagaagatg
ttgctagaatttctggtatgcctgaaataagtagagcaagtgtagtaca
tgctttaaatcaaaaggcaatagcaagaagatatgctagagaaataaac
aagaaatatgaagatataaatcttatagttgcacacatgggtggaggag
tttctgttggagctcataaaaatggtaaaatagtagatgttgcaaacgc
attagatggagaaggacctttctctccagaaagaagtggtggactacca
gtaggtgcattagtaaaaatgtgctttagtggaaaatatactcaagatg
aaattaaaaagaaaataaaaggtaatggcggactagttgcatacttaaa
cactaatgatgctagagaagttgaagaaagaattgaagctggtgatgaa
aaagctaaattagtatatgaagctatggcatatcaaatctctaaagaaa
taggagctagtgctgcagttcttaagggagatgtaaaagcaatattatt
aactggtggaatcgcatattcaaaaatgtttacagaaatgattgcagat
agagttaaatttatagcagatgtaaaagtttatccaggtgaagatgaaa
tgattgcattagctcaaggtggacttagagttttaactggtgaagaaga
ggctcaagtttatgataactaataa

TABLE 41
pLogic046-oxyS-butyrate
construct (SEQ ID NO: 169)
Nucleotide sequences of pLogic046-oxyS-butyrate
construct (SEQ ID NO: 169)

ctcgagttcattatccatcctccatcgccacgatagttcatggcgatag
gtagaatagcaatgaacgattatccctatcaagcattctgactgataat
tgctcacacgaattcattaaagaggagaaaggtaccatgatcgtaaaac
ctatggtacgcaacaatatctgcctgaacgcccatcctcagggctgcaa
gaagggagtggaagatcagattgaatataccaagaaacgcattaccgca
gaagtcaaagctggcgcaaaagctccaaaaaacgttctggtgcttggct
gctcaaatggttacggcctggcgagccgcattactgctgcgttcggata
cggggctgcgaccatcggcgtgtcctttgaaaaagcgggttcagaaacc
aaatatggtacaccgggatggtacaataatttggcatttgatgaagcgg
caaaacgcgagggtctttatagcgtgacgatcgacggcgatgcgttttc
agacgagatcaaggcccaggtaattgaggaagccaaaaaaaaaggtatc
aaatttgatctgatcgtatacagcttggccagcccagtacgtactgatc
ctgatacaggtatcatgcacaaaagcgttttgaaaccctttggaaaaac
gttcacaggcaaaacagtagatccgtttactggcgagctgaaggaaate
tccgcggaaccagcaaatgacgaggaagcagccgccactgttaaagtta
tggggggtgaagattgggaacgttggattaagcagctgtcgaaggaagg
cctcttagaagaaggctgtattaccttggcctatagttatattggccct
gaagctacccaagctttgtaccgtaaaggcacaatcggcaaggccaaag
aacacctggaggccacagcacaccgtctcaacaaagagaacccgtcaat
ccgtgccttcgtgagcgtgaataaaggcctggtaacccgcgcaagcgcc
gtaatcccggtaatccctctgtatctcgccagcttgttcaaagtaatga
aagagaagggcaatcatgaaggttgtattgaacagatcacgcgtctgta
cgccgagcgcctgtaccgtaaagatggtacaattccagttgatgaggaa
aatcgcattcgcattgatgattgggagttagaagaagacgtccagaaag
cggtatccgcgttgatggagaaagtcacgggtgaaaacgcagaatctct
cactgacttagcggggtaccgccatgatttcttagctagtaacggcttt
gatgtagaaggtattaattatgaagcggaagttgaacgcttcgaccgta
tctgataagaaggagatatacatatgagagaagtagtaattgccagtgc
agctagaacagcagtaggaagttttggaggagcatttaaatcagtttca
gcggtagagttaggggtaacagcagctaaagaagctataaaaagagcta
acataactccagatatgatagatgaatctcttttagggggagtacttac
aggaggtcttggacaaaatatagcaagacaaatagcattaggagcagga
ataccagtagaaaaaccagctatgactataaatatagtttgtggttctg
gattaagatctgtttcaatggcatctcaacttatagcattaggtgatgc
tgatataatgttagttggtggagctgaaaacatgagtatgtctccttat
ttagtaccaagtgcgagatatggtgcaagaatgggtgatgctgcttttg
ttgattcaatgataaaagatggattatcagacatatttaataactatca
catgggtattactgctgaaaacatagcagagcaatggaatataactaga
gaagaacaagatgaattagetcttgcaagtcaaaataaagctgaaaaag
ctcaagctgaaggaaaatttgatgaagaaatagttcctgttgttataaa
aggaagaaaaggtgacactgtagtagataaagatgaatatattaagcct
ggcactacaatggagaaacttgctaagttaagacctgcatttaaaaaag
atggaacagttactgctggtaatgcatcaggaataaatgatggtgctgc
tatgttagtagtaatggctaaagaaaaagctgaagaactaggaatagag
cctcttgcaactatagtttcttatggaacagctggtgttgaccctaaaa
taatgggatatggaccagttccagcaactaaaaaagctttagaagctgc
taatatgactattgaagatatagatttagttgaagctaatgaggcattt
gctgcccaatctgtagctgtaataagagacttaaatatagatatgaata
aagttaatgttaatggtggagcaatagctataggacatccaataggatg
ctcaggagcaagaatacttactacacttttatatgaaatgaagagaaga
gatgctaaaactggtcttgctacactttgtataggcggtggaatgggaa
ctactttaatagttaagagatagtaagaaggagatatacatatgaaatt
agctgtaataggtagtggaactatgggaagtggtattgtacaaactttt
gcaagttgtggacatgatgtatgtttaaagagtagaactcaaggtgcta
tagataaatgtttagctttattagataaaaatttaactaagttagttac
taagggaaaaatggatgaagctacaaaagcagaaatattaagtcatgtt
agttcaactactaattatgaagatttaaaagatatggatttaataatag
aagcatctgtagaagacatgaatataaagaaagatgttttcaagttact
agatgaattatgtaaagaagatactatcttggcaacaaatacttcatca
ttatctataacagaaatagcttcttctactaagcgcccagataaagtta
taggaatgcatttctttaatccagttcctatgatgaaattagttgaagt
tataagtggtcagttaacatcaaaagttacttttgatacagtatttgaa
ttatctaagagtatcaataaagtaccagtagatgtatctgaatctcctg
gatttgtagtaaatagaatacttatacctatgataaatgaagctgttgg
tatatatgcagatggtgttgcaagtaaagaagaaatagatgaagctatg
aaattaggagcaaaccatccaatgggaccactagcattaggtgatttaa
tcggattagatgttgttttagctataatgaacgttttatatactgaatt
tggagatactaaatatagacctcatccacttttagctaaaatggttaga
gctaatcaattaggaagaaaaactaagataggattctatgattataata
aataataagaaggagatatacatatgagtacaagtgatgttaaagttta
tgagaatgtagctgttgaagtagatggaaatatatgtacagtgaaaatg
aatagacctaaagcccttaatgcaataaattcaaagactttagaagaac
tttatgaagtatttgtagatattaataatgatgaaactattgatgttgt
aatattgacaggggaaggaaaggcatttgtagctggagcagatattgca
tacatgaaagatttagatgctgtagctgctaaagattttagtatcttag
gagcaaaagcttttggagaaatagaaaatagtaaaaaagtagtgatagc
tgctgtaaacggatttgctttaggtggaggatgtgaacttgcaatggca
tgtgatataagaattgcatctgctaaagctaaatttggtcagccagaag
taactcttggaataactccaggatatggaggaactcaaaggcttacaag
attggttggaatggcaaaagcaaaagaattaatctttacaggtcaagtt
ataaaagctgatgaagctgaaaaaatagggctagtaaatagagtcgttg
agccagacattttaatagaagaagttgagaaattagctaagataatagc
taaaaatgctcagcttgcagttagatactctaaagaagcaatacaactt
ggtgctcaaactgatataaatactggaatagatatagaatctaatttat
ttggtctttgtttttcaactaaagaccaaaaagaaggaatgtcagcttt
cgttgaaaagagagaagctaactttataaaagggtaataagaaggagat
atacatatgagaagttttgaagaagtaattaagtttgcaaaagaaagag
gacctaaaactatatcagtagcatgttgccaagataaagaagttttaat
ggcagttgaaatggctagaaaagaaaaaatagcaaatgccattttagta
ggagatatagaaaagactaaagaaattgcaaaaagcatagacatggata
tcgaaaattatgaactgatagatataaaagatttagcagaagcatctct
aaaatctgttgaattagtttcacaaggaaaagccgacatggtaatgaaa
ggcttagtagacacatcaataatactaaaagcagttttaaataaagaag
taggtcttagaactggaaatgtattaagtcacgtagcagtatttgatgt
agagggatatgatagattatttttcgtaactgacgcagctatgaactta
gctcctgatacaaatactaaaaagcaaatcatagaaaatgcttgcacag
tagcacattcattagatataagtgaaccaaaagttgctgcaatatgcgc
aaaagaaaaagtaaatccaaaaatgaaagatacagttgaagctaaagaa
ctagaagaaatgtatgaaagaggagaaatcaaaggttgtatggttggtg
ggccttttgcaattgataatgcagtatctttagaagcagctaaacataa
aggtataaatcatcctgtagcaggacgagctgatatattattagcccca
gatattgaaggtggtaacatattatataaagctttggtattcttctcaa
aatcaaaaaatgcaggagttatagttggggctaaagcaccaataatatt
aacttctagagcagacagtgaagaaactaaactaaactcaatagcttta
ggtgttttaatggcagcaaaggcataataagaaggagatatacatatga
gcaaaatatttaaaatcttaacaataaatcctggttcgacatcaactaa
aatagctgtatttgataatgaggatttagtatttgaaaaaactttaaga
cattcttcagaagaaataggaaaatatgagaaggtgtctgaccaatttg
aatttcgtaaacaagtaatagaagaagctctaaaagaaggtggagtaaa
aacatctgaattagatgctgtagtaggtagaggaggacttcttaaacct
ataaaaggtggtacttattcagtaagtgctgctatgattgaagatttaa
aagtgggagttttaggagaacacgcttcaaacctaggtggaataatagc
aaaacaaataggtgaagaagtaaatgttccttcatacatagtagaccct
gttgttgtagatgaattagaagatgttgctagaatttctggtatgcctg
aaataagtagagcaagtgtagtacatgctttaaatcaaaaggcaatagc
aagaagatatgctagagaaataaacaagaaatatgaagatataaatctt
atagttgcacacatgggtggaggagtttctgttggagctcataaaaatg
gtaaaatagtagatgttgcaaacgcattagatggagaaggacctttctc
tccagaaagaagtggtggactaccagtaggtgcattagtaaaaatgtgc
tttagtggaaaatatactcaagatgaaattaaaaagaaaataaaaggta
atggcggactagttgcatacttaaacactaatgatgctagagaagttga
agaaagaattgaagctggtgatgaaaaagctaaattagtatatgaagct
atggcatatcaaatctctaaagaaataggagctagtgctgcagttctta
agggagatgtaaaagcaatattattaactggtggaatcgcatattcaaa
aatgtttacagaaatgattgcagatagagttaaatttatagcagatgta
aaagtttatccaggtgaagatgaaatgattgcattagctcaaggtggac
ttagagttttaactggtgaagaagaggctcaagtttatgataactaata
a

TABLE 42
pZA22-oxyR construct (SEQ ID NO: 170)
Nucleotide sequences of pZA22-oxyR
construct (SEQ ID NO: 170)

ctcgagatgctagcaattgtgagcggataacaattgacattgtgagcgg
ataacaagatactgageacatcagcaggacgcactgaccttaattaaaa
gaattcattaaagaggagaaaggtaccatgaatattcgtgatcttgagt
acctggtggcattggctgaacaccgccattttcggcgtgcggcagattc
ctgccacgttagccagccgacgcttagcgggcaaattcgtaagctggaa
gatgagctgggcgtgatgttgctggagcggaccagccgtaaagtgttgt
tcacccaggcgggaatgctgctggtggatcaggcgcgtaccgtgctgcg
tgaggtgaaagtccttaaagagatggcaagccagcagggcgagacgatg
tccggaccgctgcacattggtttgattcccacagttggaccgtacctgc
taccgcatattatccctatgctgcaccagacctttccaaagctggaaat
gtatctgcatgaagcacagacccaccagttactggcgcaactggacagc
ggcaaactcgattgcgtgatcctcgcgctggtgaaagagagcgaagcat
tcattgaagtgccgttgtttgatgagccaatgttgctggctatctatga
agatcacccgtgggcgaaccgcgaatgcgtaccgatggccgatctggca
ggggaaaaactgctgatgctggaagatggtcactgtttgcgcgatcagg
caatgggtttctgttttgaagccggggcggatgaagatacacacttccg
cgcgaccagcctggaaactctgcgcaacatggtggcggcaggtagcggg
atcactttactgccagcgctggctgtgccgccggagcgcaaacgcgatg
gggttgtttatctgccgtgcattaagccggaaccacgccgcactattgg
cctggtttatcgtcctggctcaccgctgcgcagccgctatgagcagctg
gcagaggccatccgcgcaagaatggatggccatttcgataaagttttaa
aacaggcggtttaaggatcccatggtacgcgtgctagaggcatcaaata
aaacgaaaggctcagtcgaaagactgggcctttcgttttatctgttgtt
tgtcggtgaacgctctcctgagtaggacaaatccgccgccctagaccta
ggggatatattccgcttcctcgctcactgactcgctacgctcggtcgtt
cgactgcggcgagcggaaatggcttacgaacggggcggagatttcctgg
aagatgccaggaagatacttaacagggaagtgagagggccgcggcaaag
ccgtttttccataggctccgcccccctgacaagcatcacgaaatctgac
gctcaaatcagtggtggcgaaacccgacaggactataaagataccaggc
gtttccccctggcggctccctcgtgcgctctcctgttcctgcctttcgg
tttaccggtgtcattccgctgttatggccgcgtttgtctcattccacgc
ctgacactcagttccgggtaggcagttcgctccaagctggactgtatgc
acgaaccccccgttcagtccgaccgctgcgccttatccggtaactatcg
tcttgagtccaacccggaaagacatgcaaaagcaccactggcagcagcc
actggtaattgatttagaggagttagtcttgaagtcatgcgccggttaa
ggctaaactgaaaggacaagttttggtgactgcgctcctccaagccagt
tacctcggttcaaagagttggtagctcagagaaccttcgaaaaaccgcc
ctgcaaggcggttttttcgttttcagagcaagagattacgcgcagacca
aaacgatctcaagaagatcatcttattaatcagataaaatatttctaga
tttcagtgcaatttatctcttcaaatgtagcacctgaagtcagccccat
acgatataagttgttactagtgcttggattctcaccaataaaaaacgcc
cggcggcaaccgagcgttctgaacaaatccagatggagttctgaggtca
ttactggatctatcaacaggagtccaagcgagctctcgaaccccagagt
cccgctcagaagaactcgtcaagaaggcgatagaaggcgatgcgctgcg
aatcgggagcggcgataccgtaaagcacgaggaagcggtcagcccattc
gccgccaagctcttcagcaatatcacgggtagccaacgctatgtcctga
tagcggtccgccacacccagccggccacagtcgatgaatccagaaaagc
ggccattttccaccatgatattcggcaagcaggcatcgccatgggtcac
gacgagatcctcgccgtcgggcatgcgcgccttgagcctggcgaacagt
tcggctggcgcgagcccctgatgctcttcgtccagatcatcctgatcga
caagaccggcttccatccgagtacgtgctcgctcgatgcgatgtttcgc
ttggtggtcgaatgggcaggtagccggatcaagcgtatgcagccgccgc
attgcatcagccatgatggatactttctcggcaggagcaaggtgagatg
acaggagatcctgccccggcacttcgcccaatagcagccagtcccttcc
cgcttcagtgacaacgtcgagcacagctgcgcaaggaacgcccgtcgtg
gccagccacgatagccgcgctgcctcgtcctgcagttcattcagggcac
cggacaggtcggtcttgacaaaaagaaccgggcgcccctgcgctgacag
ccggaacacggcggcatcagagcagccgattgtctgttgtgcccagtca
tagccgaatagcctctccacccaagcggccggagaacctgcgtgcaatc
catcttgttcaatcatgcgaaacgatcctcatcctgtctcttgatcaga
tcttgatcccctgcgccatcagatccttggcggcaagaaagccatccag
tttactttgcagggcttcccaaccttaccagagggcgccccagctggca
attccgacgtctaagaaaccattattatcatgacattaacctataaaaa
taggcgtatcacgaggccctttcgtcttcac

TABLE 43
pLOGIC046-delta pbt.buk/tesB+-oxyS-butyrate
construct
Nucleotide sequences of pLOGIC046-delta
pbt.buk/tesB+-oxyS-butyrate
construct(SEQ ID NO: 171)
Ctcgagttcattatccatcctccatcgccacgatagttcatggcgatag
gtagaatagcaatgaacgattatccctatcaagcattctgactgataat
tgctcacacgaattcattaaagaggagaaaggtaccatgatcgtaaaac
ctatggtacgcaacaatatctgcctgaacgcccatcctcagggctgcaa
gaagggagtggaagatcagattgaatataccaagaaacgcattaccgca
gaagtcaaagctggcgcaaaagctccaaaaaacgttctggtgcttggct
gctcaaatggttacggcctggcgagccgcattactgctgcgttcggata
cggggctgcgaccatcggcgtgtcctttgaaaaagcgggttcagaaacc
aaatatggtacaccgggatggtacaataatttggcatttgatgaagcgg
caaaacgcgagggtctttatagcgtgacgatcgacggcgatgcgttttc
agacgagatcaaggcccaggtaattgaggaagccaaaaaaaaaggtatc
aaatttgatctgatcgtatacagcttggccagcccagtacgtactgatc
ctgatacaggtatcatgcacaaaagcgttttgaaaccctttggaaaaac
gttcacaggcaaaacagtagatccgtttactggcgagctgaaggaaatc
tccgcggaaccagcaaatgacgaggaagcagccgccactgttaaagtta
tggggggtgaagattgggaacgttggattaagcagctgtcgaaggaagg
cctcttagaagaaggctgtattaccttggcctatagttatattggccct
gaagctacccaagctttgtaccgtaaaggcacaatcggcaaggccaaag
aacacctggaggccacagcacaccgtctcaacaaagagaacccgtcaat
ccgtgccttcgtgagcgtgaataaaggcctggtaacccgcgcaagcgcc
gtaatcccggtaatccctctgtatctcgccagcttgttcaaagtaatga
aagagaagggcaatcatgaaggttgtattgaacagatcacgcgtctgta
cgccgagcgcctgtaccgtaaagatggtacaattccagttgatgaggaa
aatcgcattcgcattgatgattgggagttagaagaagacgtccagaaag
cggtatccgcgttgatggagaaagtcacgggtgaaaacgcagaatctct
cactgacttagcggggtaccgccatgatttcttagctagtaacggcttt
gatgtagaaggtattaattatgaagcggaagttgaacgcttcgaccgta
tctgataagaaggagatatacatatgagagaagtagtaattgccagtgc
agctagaacagcagtaggaagttttggaggagcatttaaatcagtttca
gcggtagagttaggggtaacagcagctaaagaagctataaaaagagcta
acataactccagatatgatagatgaatctcttttagggggagtacttac
agcaggtcttggacaaaatatagcaagacaaatagcattaggagcagga
ataccagtagaaaaaccagctatgactataaatatagtttgtggttctg
gattaagatctgtttcaatggcatctcaacttatagcattaggtgatgc
tgatataatgttagttggtggagctgaaaacatgagtatgtctccttat
ttagtaccaagtgcgagatatggtgcaagaatgggtgatgctgcttttg
ttgattcaatgataaaagatggattatcagacatatttaataactatca
catgggtattactgctgaaaacatagcagagcaatggaatataactaga
gaagaacaagatgaattagctcttgcaagtcaaaataaagctgaaaaag
ctcaagctgaaggaaaatttgatgaagaaatagttcctgttgttataaa
aggaagaaaaggtgacactgtagtagataaagatgaatatattaagcct
ggcactacaatggagaaacttgctaagttaagacctgcatttaaaaaag
atggaacagttactgctggtaatgcatcaggaataaatgatggtgctgc
tatgttagtagtaatggctaaagaaaaagctgaagaactaggaatagag
cctcttgcaactatagtttcttatggaacagctggtgttgaccctaaaa
taatgggatatggaccagttccagcaactaaaaaagctttagaagctgc
taatatgactattgaagatatagatttagttgaagctaatgaggcattt
gctgcccaatctgtagctgtaataagagacttaaatatagatatgaata
aagttaatgttaatggtggagcaatagctataggacatccaataggatg
ctcaggagcaagaatacttactacacttttatatgaaatgaagagaaga
gatgctaaaactggtcttgctacactttgtataggcggtggaatgggaa
ctactttaatagttaagagatagtaagaaggagatatacatatgaaatt
agctgtaataggtagtggaactatgggaagtggtattgtacaaactttt
gcaagttgtggacatgatgtatgtttaaagagtagaactcaaggtgcta
tagataaatgtttagctttattagataaaaatttaactaagttagttac
taagggaaaaatggatgaagctacaaaagcagaaatattaagtcatgtt
agttcaactactaattatgaagatttaaaagatatggatttaataatag
aagcatctgtagaagacatgaatataaagaaagatgttttcaagttact
agatgaattatgtaaagaagatactatcttggcaacaaatacttcatca
ttatctataacagaaatagcttcttctactaagcgcccagataaagtta
taggaatgcatttctttaatccagttcctatgatgaaattagttgaagt
tataagtggtcagttaacatcaaaagttacttttgatacagtatttgaa
ttatctaagagtatcaataaagtaccagtagatgtatctgaatctcctg
gatttgtagtaaatagaatacttatacctatgataaatgaagctgttgg
tatatatgcagatggtgttgcaagtaaagaagaaatagatgaagctatg
aaattaggagcaaaccatccaatgggaccactagcattaggtgatttaa
tcggattagatgttgttttagctataatgaacgttttatatactgaatt
tggagatactaaatatagacctcatccacttttagctaaaatggttaga
gctaatcaattaggaagaaaaactaagataggattctatgattataata
aataataagaaggagatatacatatgagtacaagtgatgttaaagttta
tgagaatgtagctgttgaagtagatggaaatatatgtacagtgaaaatg
aatagacctaaagcccttaatgcaataaattcaaagactttagaagaac
tttatgaagtatttgtagatattaataatgatgaaactattgatgttgt
aatattgacaggggaaggaaaggcatttgtagctggagcagatattgca
tacatgaaagatttagatgctgtagctgctaaagattttagtatcttag
gagcaaaagcttttggagaaatagaaaatagtaaaaaagtagtgatagc
tgctgtaaacggatttgctttaggtggaggatgtgaacttgcaatggca
tgtgatataagaattgcatctgctaaagctaaatttggtcagccagaag
taactcttggaataactccaggatatggaggaactcaaaggcttacaag
attggttggaatggcaaaagcaaaagaattaatctttacaggtcaagtt
ataaaagctgatgaagctgaaaaaatagggetagtaaatagagtcgttg
agccagacattttaatagaagaagttgagaaattagctaagataatagc
taaaaatgctcagcttgcagttagatactctaaagaagcaatacaactt
ggtgctcaaactgatataaatactggaatagatatagaatctaatttat
ttggtctttgtttttcaactaaagaccaaaaagaaggaatgtcagcttt
cgttgaaaagagagaagctaactttataaaagggtaataagaaggagat
atacatatgAGTCAGGCGCTAAAAAATTTACTGACATTGTTAAATCTGG
AAAAAATTGAGGAAGGACTCTTTCGCGGCCAGAGTGAAGATTTAGGTTT
ACGCCAGGTGTTTGGCGGCCAGGTCGTGGGTCAGGCCTTGTATGCTGCA
AAAGAGACCGTCCCTGAAGAGCGGCTGGTACATTCGTTTCACAGCTACT
TTCTTCGCCCTGGCGATAGTAAGAAGCCGATTATTTATGATGTCGAAAC
GCTGCGTGACGGTAACAGCTTCAGCGCCCGCCGGGTTGCTGCTATTCAA
AACGGCAAACCGATTTTTTATATGACTGCCTCTTTCCAGGCACCAGAAG
CGGGTTTCGAACATCAAAAAACAATGCCGTCCGCGCCAGCGCCTGATGG
CCTCCCTTCGGAAACGCAAATCGCCCAATCGCTGGCGCACCTGCTGCCG
CCAGTGCTGAAAGATAAATTCATCTGCGATCGTCCGCTGGAAGTCCGTC
CGGTGGAGTTTCATAACCCACTGAAAGGTCACGTCGCAGAACCACATCG
TCAGGTGTGGATCCGCGCAAATGGTAGCGTGCCGGATGACCTGCGCGTT
CATCAGTATCTGCTCGGTTACGCTTCTGATCTTAACTTCCTGCCGGTAG
CTCTACAGCCGCACGGCATCGGTTTTCTCGAACCGGGGATTCAGATTGC
CACCATTGACCATTCCATGTGGTTCCATCGCCCGTTTAATTTGAATGAA
TGGCTGCTGTATAGCGTGGAGAGCACCTCGGCGTCCAGCGCACGTGGCT
TTGTGCGCGGTGAGTTTTATACCCAAGACGGCGTACTGGTTGCCTCGAC
CGTTCAGGAAGGGGTGATGCGTAATCACAATtaa

[1273] In some embodiments, the butyrate gene cassette (e.g., bcd2-etfB3-etfA3-thiA1-hbd-crt2-pbt buk butyrate cassette (pLogic031), and/or ter-thiA1-hbd-crt2-pbt buk butyrate cassette (pLogic046) and/or ter-thiA1-hbd-crt2-tesb butyrate cassette (pLOGIC046-delta pbt.buk/tesB+)) is placed under the control of a FNR regulatory region selected from Table 21 or 22 and SEQ ID NOs: 141-157. In certain constructs, the FNR-responsive promoter is further fused to a strong ribosome binding site sequence. For efficient translation of butyrate genes, each synthetic gene in the operon was separated by a 15 base pair ribosome binding site derived from the T7 promoter/translational start site.

### Example 2. Construction of Vectors for Overproducing Butyrate Using an Inducible Tet Promoter-Butyrate Circuit

[1274] To facilitate inducible production of butyrate in Escherichia coli Nissle, the eight genes of the butyrate production pathway from Peptoclostridium difficile 630 (bcd2, etfB3, etfA3, thiA1, hbd, crt2, bpt, and buk; NCBI), as well as transcriptional and translational elements, were synthesized (Gen9, Cambridge, Mass.) and cloned into vector pBR322 to create pLogic031. For efficient translation of butyrate genes, each synthetic gene in the operon was separated by a 15 base pair ribosome binding site derived from the T7 promoter.

[1275] The gene products of bcd2-etfA3-etfB3 form a complex that convert crotonyl-CoA to butyryl-CoA, and may show some dependence on oxygen as a co-oxidant. For reasons described in Example 1, a second plasmid was generated, in which bcd2-etfA3-etfB3 was replaced with (trans-2-enoynl-CoA reductase; ter from Treponema denticola capable of butyrate production in E. coli. Inverse PCR was used to amplify the entire sequence of pLogic031 outside of the bcd-etfA3-etfB3 region. The ter gene was codon optimized for E. coli codon usage using Integrated DNA technologies online codon optimization tool, synthesized (Genewiz, Cambridge, Mass.), and cloned into this inverse PCR fragment using Gibson assembly to create pLogic046.

[1276] A third butyrate gene cassette was further generated, in which the pbt and buk genes were replaced with tesB (SEQ ID NO: 10). TesB is a thioesterase found in E. coli that cleaves off the butyrate from butyryl-coA, thus obviating the need for pbt-buk (see FIG. 2). The third butyrate gene cassette, as well as transcriptional and translational elements, is synthesized (Gen9, Cambridge, Mass.) and cloned into vector pBR322 to create pLOGIC046-delta pbt.buk/tesB+(ter-thiA1-hbd-crt2-tesb butyrate cassette, also referred to herein as tesB butyrate cassette).

[1277] As synthesized, the all three butyrate gene cassettes were placed under control of a tetracycline-inducible promoter, with the let repressor (tetR) expressed constitutively, divergent from the tet-inducible synthetic butyrate operon.

[1278] Nucleic acid sequences of tetracycline-regulated constructs comprising a let promoter are shown in Table 44 and Table 45 and Table 46. Table 44 depicts the nucleic acid sequence of an exemplary tetracycline-regulated construct comprising a tet promoter and a butyrogenic gene cassette (pLogic031-tet-butyrate construct; SEQ ID NO: 78). The sequence encoding TetR is underlined, and the overlapping tetR/tetA promoters are [symbol] . Table 45 depicts the nucleic acid sequence of an exemplary tetracycline-regulated construct comprising a let promoter and a butyrogenic gene cassette (pLogic046-tet-butyrate construct; SEQ ID NO: 79). The sequence encoding TetR is underlined, and the overlapping tetR/tetA promoters are [symbol] .

[1279] Table 46 depicts the nucleic acid sequence of an exemplary tetracycline-regulated construct (pLOGIC046-delta pbt.buk/tesB+-tet-butyrate construct) comprising a reverse complement of the tetR repressor (underlined), an intergenic region containing divergent promoters controlling tetR and the butyrate operon and their respective RBS (bold), and the butyrate genes separated by RBS.

[1280] In some embodiments, genetically engineered bacteria comprise a nucleic acid sequence that is at least about 80%, at least about 85%, at least about 90%, at least about 95%, or at least about 99% homologous to the DNA sequence of SEQ ID NO: 172, 173, or 174 or a functional fragment thereof.

TABLE 44
pLogic031-tet-butyrate construct (SEQ ID NO: 172)
Nucleotide sequences of pLogic031-tet-butyrate construct

(SEQ ID NO: 172)
gtaaaacgacggccagtgaattcgttaagacccactttcacatttaagttgtttttctaatccgcatatg
atcaattcaaggccgaataagaaggctggctctgcaccttggtgatcaaataattcgatagcttgtcgta
ataatggcggcatactatcagtagtaggtgtttccctttcttctttagcgacttgatgctcttgatcttc
caatacgcaacctaaagtaaaatgccccacagcgctgagtgcatataatgcattctctagtgaaaaacct
tgttggcataaaaaggctaattgattttcgagagtttcatactgtttttctgtaggccgtgtacctaaat
gtacttttgctccatcgcgatgacttagtaaagcacatctaaaacttttagcgttattacgtaaaaaatc
ttgccagctttccccttctaaagggcaaaagtgagtatggtgcctatctaacatctcaatggctaaggcg
tcgagcaaagcccgcttattttttacatgccaatacaatgtaggctgctctacacctagcttctgggcga
gtttacgggttgttaaaccttcgattccgacctcattaagcagctctaatgcgctgttaatcactttact

[chemical structure]

[chemical structure]

atatggatttaaattctaaaaaatatcagatgcttaaagagctatatgtaagcttcgctgaaaatgaagt
taaacctttagcaacagaacttgatgaagaagaaagatttccttatgaaacagtggaaaaaatggcaaaa
gcaggaatgatgggtataccatatccaaaagaatatggtggagaaggtggagacactgtaggatatataa
tggcagttgaagaattgtctagagtttgtggtactacaggagttatattatcagctcatacatctcttgg
ctcatggcctatatatcaatatggtaatgaagaacaaaaacaaaaattcttaagaccactagcaagtgga
gaaaaattaggagcatttggtcttactgagcctaatgctggtacagatgcgtctggccaacaaacaactg
ctgttttagacggggatgaatacatacttaatggctcaaaaatatttataacaaacgcaatagctggtga
catatatgtagtaatggcaatgactgataaatctaaggggaacaaaggaatatcagcatttatagttgaa
aaaggaactcctgggtttagctttggagttaaagaaaagaaaatgggtataagaggttcagctacgagtg
aattaatatttgaggattgcagaatacctaaagaaaatttacttggaaaagaaggtcaaggatttaagat
agcaatgtctactcttgatggtggtagaattggtatagctgcacaagctttaggtttagcacaaggtgct
cttgatgaaactgttaaatatgtaaaagaaagagtacaatttggtagaccattatcaaaattccaaaata
cacaattccaattagctgatatggaagttaaggtacaagcggctagacaccttgtatatcaagcagctat
aaataaagacttaggaaaaccttatggagtagaagcagcaatggcaaaattatttgcagctgaaacagct
atggaagttactacaaaagctgtacaacttcatggaggatatggatacactcgtgactatccagtagaaa
gaatgatgagagatgctaagataactgaaatatatgaaggaactagtgaagttcaaagaatggttatttc
aggaaaactattaaaatagtaagaaggagatatacatatggaggaaggatttatgaatatagtcgtttgt
ataaaacaagttccagatacaacagaagttaaactagatcctaatacaggtactttaattagagatggag
taccaagtataataaaccctgatgataaagcaggtttagaagaagctataaaattaaaagaagaaatggg
tgctcatgtaactgttataacaatgggacctcctcaagcagatatggctttaaaagaagctttagcaatg
ggtgcagatagaggtatattattaacagatagagcatttgcgggtgctgatacttgggcaacttcatcag
cattagcaggagcattaaaaaatatagattttgatattataatagctggaagacaggcgatagatggaga
tactgcacaagttggacctcaaatagctgaacatttaaatcttccatcaataacatatgctgaagaaata
aaaactgaaggtgaatatgtattagtaaaaagacaatttgaagattgttgccatgacttaaaagttaaaa
tgccatgccttataacaactcttaaagatatgaacacaccaagatacatgaaagttggaagaatatatga
tgctttcgaaaatgatgtagtagaaacatggactgtaaaagatatagaagttgacccttctaatttaggt
cttaaaggttctccaactagtgtatttaaatcatttacaaaatcagttaaaccagctggtacaatataca
atgaagatgcgaaaacatcagctggaattatcatagataaattaaaagagaagtatatcatataataaga
aggagatatacatatgggtaacgttttagtagtaatagaacaaagagaaaatgtaattcaaactgtttct
ttagaattactaggaaaggctacagaaatagcaaaagattatgatacaaaagtttctgcattacttttag
gtagtaaggtagaaggtttaatagatacattagcacactatggtgcagatgaggtaatagtagtagatga
tgaagctttagcagtgtatacaactgaaccatatacaaaagcagcttatgaagcaataaaagcagctgac
cctatagttgtattatttggtgcaacttcaataggtagagatttagcgcctagagtttctgctagaatac
atacaggtcttactgctgactgtacaggtcttgcagtagctgaagatacaaaattattattaatgacaag
acctgcctttggtggaaatataatggcaacaatagtttgtaaagatttcagacctcaaatgtctacagtt
agaccaggggttatgaagaaaaatgaacctgatgaaactaaagaagctgtaattaaccgtttcaaggtag
aatttaatgatgctgataaattagttcaagttgtacaagtaataaaagaagctaaaaaacaagttaaaat
agaagatgctaagatattagtttctgctggacgtggaatgggtggaaaagaaaacttagacatactttat
gaattagctgaaattataggtggagaagtttctggttctcgtgccactatagatgcaggttggttagata
aagcaagacaagttggtcaaactggtaaaactgtaagaccagacctttatatagcatgtggtatatctgg
agcaatacaacatatagctggtatggaagatgctgagtttatagttgctataaataaaaatccagaagct
ccaatatttaaatatgctgatgttggtatagttggagatgttcataaagtgcttccagaacttatcagtc
agttaagtgttgcaaaagaaaaaggtgaagttttagctaactaataagaaggagatatacatatgagaga
agtagtaattgccagtgcagctagaacagcagtaggaagttttggaggagcatttaaatcagtttcagcg
gtagagttaggggtaacagcagctaaagaagctataaaaagagctaacataactccagatatgatagatg
aatctcttttagggggagtacttacagcaggtcttggacaaaatatagcaagacaaatagcattaggagc
aggaataccagtagaaaaaccagctatgactataaatatagtttgtggttctggattaagatctgtttca
atggcatctcaacttatagcattaggtgatgctgatataatgttagttggtggagctgaaaacatgagta
tgtctccttatttagtaccaagtgcgagatatggtgcaagaatgggtgatgctgcttttgttgattcaat
gataaaagatggattatcagacatatttaataactatcacatgggtattactgctgaaaacatagcagag
caatggaatataactagagaagaacaagatgaattagctcttgcaagtcaaaataaagctgaaaaagctc
aagctgaaggaaaatttgatgaagaaatagttcctgttgttataaaaggaagaaaaggtgacactgtagt
agataaagatgaatatattaagcctggcactacaatggagaaacttgctaagttaagacctgcatttaaa
aaagatggaacagttactgctggtaatgcatcaggaataaatgatggtgctgctatgttagtagtaatgg
ctaaagaaaaagctgaagaactaggaatagagcctcttgcaactatagtttcttatggaacagctggtgt
tgaccctaaaataatgggatatggaccagttccagcaactaaaaaagctttagaagctgctaatatgact
attgaagatatagatttagttgaagctaatgaggcatttgctgcccaatctgtagctgtaataagagact
taaatatagatatgaataaagttaatgttaatggtggagcaatagctataggacatccaataggatgctc
aggagcaagaatacttactacacttttatatgaaatgaagagaagagatgctaaaactggtcttgctaca
ctttgtataggcggtggaatgggaactactttaatagttaagagatagtaagaaggagatatacatatga
aattagctgtaataggtagtggaactatgggaagtggtattgtacaaacttttgcaagttgtggacatga
tgtatgtttaaagagtagaactcaaggtgctatagataaatgtttagctttattagataaaaatttaact
aagttagttactaagggaaaaatggatgaagctacaaaagcagaaatattaagtcatgttagttcaacta
ctaattatgaagatttaaaagatatggatttaataatagaagcatctgtagaagacatgaatataaagaa
agatgttttcaagttactagatgaattatgtaaagaagatactatcttggcaacaaatacttcatcatta
tctataacagaaatagcttcttctactaagcgcccagataaagttataggaatgcatttctttaatccag
ttcctatgatgaaattagttgaagttataagtggtcagttaacatcaaaagttacttttgatacagtatt
tgaattatctaagagtatcaataaagtaccagtagatgtatctgaatctcctggatttgtagtaaataga
atacttatacctatgataaatgaagctgttggtatatatgcagatggtgttgcaagtaaagaagaaatag
atgaagctatgaaattaggagcaaaccatccaatgggaccactagcattaggtgatttaatcggattaga
tgttgttttagctataatgaacgttttatatactgaatttggagatactaaatatagacctcatccactt
ttagctaaaatggttagagctaatcaattaggaagaaaaactaagataggattctatgattataataaat
aataagaaggagatatacatatgagtacaagtgatgttaaagtttatgagaatgtagctgttgaagtaga
tggaaatatatgtacagtgaaaatgaatagacctaaagcccttaatgcaataaattcaaagactttagaa
gaactttatgaagtatttgtagatattaataatgatgaaactattgatgttgtaatattgacaggggaag
gaaaggcatttgtagctggagcagatattgcatacatgaaagatttagatgctgtagctgctaaagattt
tagtatcttaggagcaaaagcttttggagaaatagaaaatagtaaaaaagtagtgatagctgctgtaaac
ggatttgctttaggtggaggatgtgaacttgcaatggcatgtgatataagaattgcatctgctaaagcta
aatttggtcagccagaagtaactcttggaataactccaggatatggaggaactcaaaggcttacaagatt
ggttggaatggcaaaagcaaaagaattaatctttacaggtcaagttataaaagctgatgaagctgaaaaa
atagggctagtaaatagagtcgttgagccagacattttaatagaagaagttgagaaattagctaagataa
tagctaaaaatgctcagcttgcagttagatactctaaagaagcaatacaacttggtgctcaaactgatat
aaatactggaatagatatagaatctaatttatttggtctttgtttttcaactaaagaccaaaaagaagga
atgtcagctttcgttgaaaagagagaagctaactttataaaagggtaataagaaggagatatacatatga
gaagttttgaagaagtaattaagtttgcaaaagaaagaggacctaaaactatatcagtagcatgttgcca
agataaagaagttttaatggcagttgaaatggctagaaaagaaaaaatagcaaatgccattttagtagga
gatatagaaaagactaaagaaattgcaaaaagcatagacatggatatcgaaaattatgaactgatagata
taaaagatttagcagaagcatctctaaaatctgttgaattagtttcacaaggaaaagccgacatggtaat
gaaaggcttagtagacacatcaataatactaaaagcagttttaaataaagaagtaggtcttagaactgga
aatgtattaagtcacgtagcagtatttgatgtagagggatatgatagattatttttcgtaactgacgcag
ctatgaacttagctcctgatacaaatactaaaaagcaaatcatagaaaatgcttgcacagtagcacattc
attagatataagtgaaccaaaagttgctgcaatatgcgcaaaagaaaaagtaaatccaaaaatgaaagat
acagttgaagctaaagaactagaagaaatgtatgaaagaggagaaatcaaaggttgtatggttggtgggc
cttttgcaattgataatgcagtatctttagaagcagctaaacataaaggtataaatcatcctgtagcagg
acgagctgatatattattagccccagatattgaaggtggtaacatattatataaagctttggtattcttc
tcaaaatcaaaaaatgcaggagttatagttggggctaaagcaccaataatattaacttctagagcagaca
gtgaagaaactaaactaaactcaatagctttaggtgttttaatggcagcaaaggcataataagaaggaga
tatacatatgagcaaaatatttaaaatcttaacaataaatcctggttcgacatcaactaaaatagctgta
tttgataatgaggatttagtatttgaaaaaactttaagacattcttcagaagaaataggaaaatatgaga
aggtgtctgaccaatttgaatttcgtaaacaagtaatagaagaagctctaaaagaaggtggagtaaaaac
atctgaattagatgctgtagtaggtagaggaggacttcttaaacctataaaaggtggtacttattcagta
agtgctgctatgattgaagatttaaaagtgggagttttaggagaacacgcttcaaacctaggtggaataa
tagcaaaacaaataggtgaagaagtaaatgttccttcatacatagtagaccctgttgttgtagatgaatt
agaagatgttgctagaatttctggtatgcctgaaataagtagagcaagtgtagtacatgctttaaatcaa
aaggcaatagcaagaagatatgctagagaaataaacaagaaatatgaagatataaatcttatagttgcac
acatgggtggaggagtttctgttggagctcataaaaatggtaaaatagtagatgttgcaaacgcattaga
tggagaaggacctttctctccagaaagaagtggtggactaccagtaggtgcattagtaaaaatgtgcttt
agtggaaaatatactcaagatgaaattaaaaagaaaataaaaggtaatggcggactagttgcatacttaa
acactaatgatgctagagaagttgaagaaagaattgaagctggtgatgaaaaagctaaattagtatatga
agctatggcatatcaaatctctaaagaaataggagctagtgctgcagttcttaagggagatgtaaaagca
atattattaactggtggaatcgcatattcaaaaatgtttacagaaatgattgcagatagagttaaattta
tagcagatgtaaaagtttatccaggtgaagatgaaatgattgcattagctcaaggtggacttagagtttt
aactggtgaagaagaggctcaagtttatgataactaataa

TABLE 45
pLogic046-tet-butyrate construct (SEQ ID NO: 173)
Nucleotide sequences of pLogic046-tet-butyrate construct

(SEQ ID NO: 173)
gtaaaacgacggccagtgaattcgttaagacccactttcacatttaagttgtttttctaatccgcatatg
atcaattcaaggccgaataagaaggctggctctgcaccttggtgatcaaataattcgatagcttgtcgta
ataatggcggcatactatcagtagtaggtgtttccctttcttctttagcgacttgatgctcttgatcttc
caatacgcaacctaaagtaaaatgccccacagcgctgagtgcatataatgcattctctagtgaaaaacct
tgttggcataaaaaggctaattgattttcgagagtttcatactgtttttctgtaggccgtgtacctaaat
gtactttgctccatcgcgatgacttagtaaagcacatctaaaacttttagcgttattacgtaaaaaaatc
ttgccagctttccccttctaaagggcaaaagtgagtatggtgcctatctaacatctcaatggctaaggcg
tcgagcaaagcccgcttattttttacatgccaatacaatgtaggctgctctacacctagcttctgggcga
gtttacgggttgttaaaccttcgattccgacctcattaagcagctctaatgcgctgttaatcactttact

[chemical structure]

[chemical structure]

atatgatcgtaaaacctatggtacgcaacaatatctgcctgaacgcccatcctcagggctgcaagaaggg
agtggaagatcagattgaatataccaagaaacgcattaccgcagaagtcaaagctggcgcaaaagctcca
aaaaacgttctggtgcttggctgctcaaatggttacggcctggcgagccgcattactgctgcgttcggat
acggggctgcgaccatcggcgtgtcctttgaaaaagcgggttcagaaaccaaatatggtacaccgggatg
gtacaataatttggcatttgatgaagcggcaaaacgcgagggtctttatagcgtgacgatcgacggcgat
gcgttttcagacgagatcaaggcccaggtaattgaggaagccaaaaaaaaaggtatcaaatttgatctga
tcgtatacagcttggccagcccagtacgtactgatcctgatacaggtatcatgcacaaaagcgttttgaa
accctttggaaaaacgttcacaggcaaaacagtagatccgtttactggcgagctgaaggaaatctccgcg
gaaccagcaaatgacgaggaagcagccgccactgttaaagttatggggggtgaagattgggaacgttgga
ttaagcagctgtcgaaggaaggcctcttagaagaaggctgtattaccttggcctatagttatattggccc
tgaagctacccaagctttgtaccgtaaaggcacaatcggcaaggccaaagaacacctggaggccacagca
caccgtctcaacaaagagaacccgtcaatccgtgccttcgtgagcgtgaataaaggcctggtaacccgcg
caagcgccgtaatcccggtaatccctctgtatctcgccagcttgttcaaagtaatgaaagagaagggcaa
tcatgaaggttgtattgaacagatcacgcgtctgtacgccgagcgcctgtaccgtaaagatggtacaatt
ccagttgatgaggaaaatcgcattcgcattgatgattgggagttagaagaagacgtccagaaagcggtat
ccgcgttgatggagaaagtcacgggtgaaaacgcagaatctctcactgacttagcggggtaccgccatga
tttcttagctagtaacggctttgatgtagaaggtattaattatgaagcggaagttgaacgcttcgaccgt
atctgataagaaggagatatacatatgagagaagtagtaattgccagtgcagctagaacagcagtaggaa
gttttggaggagcatttaaatcagtttcagcggtagagttaggggtaacagcagctaaagaagctataaa
aagagctaacataactccagatatgatagatgaatctcttttagggggagtacttacagcaggtcttgga
caaaatatagcaagacaaatagcattaggagcaggaataccagtagaaaaaccagctatgactataaata
tagtttgtggttctggattaagatctgtttcaatggcatctcaacttatagcattaggtgatgctgatat
aatgttagttggtggagctgaaaacatgagtatgtctccttatttagtaccaagtgcgagatatggtgca
agaatgggtgatgctgcttttgttgattcaatgataaaagatggattatcagacatatttaataactatc
acatgggtattactgctgaaaacatagcagagcaatggaatataactagagaagaacaagatgaattagc
tcttgcaagtcaaaataaagctgaaaaagctcaagctgaaggaaaatttgatgaagaaatagttcctgtt
gttataaaaggaagaaaaggtgacactgtagtagataaagatgaatatattaagcctggcactacaatgg
agaaacttgctaagttaagacctgcatttaaaaaagatggaacagttactgctggtaatgcatcaggaat
aaatgatggtgctgctatgttagtagtaatggctaaagaaaaagctgaagaactaggaatagagcctctt
gcaactatagtttcttatggaacagctggtgttgaccctaaaataatgggatatggaccagttccagcaa
ctaaaaaagctttagaagctgctaatatgactattgaagatatagatttagttgaagctaatgaggcatt
tgctgcccaatctgtagctgtaataagagacttaaatatagatatgaataaagttaatgttaatggtgga
gcaatagctataggacatccaataggatgctcaggagcaagaatacttactacacttttatatgaaatga
agagaagagatgctaaaactggtcttgctacactttgtataggcggtggaatgggaactactttaatagt
taagagatagtaagaaggagatatacatatgaaattagctgtaataggtagtggaactatgggaagtggt
attgtacaaacttttgcaagttgtggacatgatgtatgtttaaagagtagaactcaaggtgctatagata
aatgtttagctttattagataaaaatttaactaagttagttactaagggaaaaatggatgaagctacaaa
agcagaaatattaagtcatgttagttcaactactaattatgaagatttaaaagatatggatttaataata
gaagcatctgtagaagacatgaatataaagaaagatgttttcaagttactagatgaattatgtaaagaag
atactatcttggcaacaaatacttcatcattatctataacagaaatagcttcttctactaagcgcccaga
taaagttataggaatgcatttctttaatccagttcctatgatgaaattagttgaagttataagtggtcag
ttaacatcaaaagttacttttgatacagtatttgaattatctaagagtatcaataaagtaccagtagatg
tatctgaatctcctggatttgtagtaaatagaatacttatacctatgataaatgaagctgttggtatata
tgcagatggtgttgcaagtaaagaagaaatagatgaagctatgaaattaggagcaaaccatccaatggga
ccactagcattaggtgatttaatcggattagatgttgttttagctataatgaacgttttatatactgaat
ttggagatactaaatatagacctcatccacttttagctaaaatggttagagctaatcaattaggaagaaa
aactaagataggattctatgattataataaataataagaaggagatatacatatgagtacaagtgatgtt
aaagtttatgagaatgtagctgttgaagtagatggaaatatatgtacagtgaaaatgaatagacctaaag
cccttaatgcaataaattcaaagactttagaagaactttatgaagtatttgtagatattaataatgatga
aactattgatgttgtaatattgacaggggaaggaaaggcatttgtagctggagcagatattgcatacatg
aaagatttagatgctgtagctgctaaagattttagtatcttaggagcaaaagcttttggagaaatagaaa
atagtaaaaaagtagtgatagctgctgtaaacggatttgctttaggtggaggatgtgaacttgcaatggc
atgtgatataagaattgcatctgctaaagctaaatttggtcagccagaagtaactcttggaataactcca
ggatatggaggaactcaaaggcttacaagattggttggaatggcaaaagcaaaagaattaatctttacag
gtcaagttataaaagctgatgaagctgaaaaaatagggctagtaaatagagtcgttgagccagacatttt
aatagaagaagttgagaaattagctaagataatagctaaaaatgctcagcttgcagttagatactctaaa
gaagcaatacaacttggtgctcaaactgatataaatactggaatagatatagaatctaatttatttggtc
tttgtttttcaactaaagaccaaaaagaaggaatgtcagctttcgttgaaaagagagaagctaactttat
aaaagggtaataagaaggagatatacatatgagaagttttgaagaagtaattaagtttgcaaaagaaaga
ggacctaaaactatatcagtagcatgttgccaagataaagaagttttaatggcagttgaaatggctagaa
aagaaaaaatagcaaatgccattttagtaggagatatagaaaagactaaagaaattgcaaaaagcataga
catggatatcgaaaattatgaactgatagatataaaagatttagcagaagcatctctaaaatctgttgaa
ttagtttcacaaggaaaagccgacatggtaatgaaaggcttagtagacacatcaataatactaaaagcag
ttttaaataaagaagtaggtcttagaactggaaatgtattaagtcacgtagcagtatttgatgtagaggg
atatgatagattatttttcgtaactgacgcagctatgaacttagctcctgatacaaatactaaaaagcaa
atcatagaaaatgcttgcacagtagcacattcattagatataagtgaaccaaaagttgctgcaatatgcg
caaaagaaaaagtaaatccaaaaatgaaagatacagttgaagctaaagaactagaagaaatgtatgaaag
aggagaaatcaaaggttgtatggttggtgggccttttgcaattgataatgcagtatctttagaagcagct
aaacataaaggtataaatcatcctgtagcaggacgagctgatatattattagccccagatattgaaggtg
gtaacatattatataaagctttggtattcttctcaaaatcaaaaaatgcaggagttatagttggggctaa
agcaccaataatattaacttctagagcagacagtgaagaaactaaactaaactcaatagctttaggtgtt
ttaatggcagcaaaggcataataagaaggagatatacatatgagcaaaatatttaaaatcttaacaataa
atcctggttcgacatcaactaaaatagctgtatttgataatgaggatttagtatttgaaaaaactttaag
acattcttcagaagaaataggaaaatatgagaaggtgtctgaccaatttgaatttcgtaaacaagtaata
gaagaagctctaaaagaaggtggagtaaaaacatctgaattagatgctgtagtaggtagaggaggacttc
ttaaacctataaaaggtggtacttattcagtaagtgctgctatgattgaagatttaaaagtgggagtttt
aggagaacacgcttcaaacctaggtggaataatagcaaaacaaataggtgaagaagtaaatgttccttca
tacatagtagaccctgttgttgtagatgaattagaagatgttgctagaatttctggtatgcctgaaataa
gtagagcaagtgtagtacatgctttaaatcaaaaggcaatagcaagaagatatgctagagaaataaacaa
gaaatatgaagatataaatcttatagttgcacacatgggtggaggagtttctgttggagctcataaaaat
ggtaaaatagtagatgttgcaaacgcattagatggagaaggacctttctctccagaaagaagtggtggac
taccagtaggtgcattagtaaaaatgtgctttagtggaaaatatactcaagatgaaattaaaaagaaaat
aaaaggtaatggcggactagttgcatacttaaacactaatgatgctagagaagttgaagaaagaattgaa
gctggtgatgaaaaagctaaattagtatatgaagctatggcatatcaaatctctaaagaaataggagcta
gtgctgcagttcttaagggagatgtaaaagcaatattattaactggtggaatcgcatattcaaaaatgtt
tacagaaatgattgcagatagagttaaatttatagcagatgtaaaagtttatccaggtgaagatgaaatg
attgcattagctcaaggtggacttagagttttaactggtgaagaagaggctcaagtttatgataactaat
aa

TABLE 46
pLOGIC046-delta pbt.buk/tesB+-tet-butyrate
construct (SEQ ID NO: 174)

SEQ ID NO: 174
gtaaaacgacggccagtgaattcgttaagacccactttcacatttaagt
tgtttttctaatccgcatatgatcaattcaaggccgaataagaaggctg
gctctgcaccttggtgatcaaataattcgatagcttgtcgtaataatgg
cggcatactatcagtagtaggtgtttccctttcttctttagcgacttga
tgctcttgatcttccaatacgcaacctaaagtaaaatgccccacagcgc
tgagtgcatataatgcattctctagtgaaaaaccttgttggcataaaaa
ggctaattgattttcgagagtttcatactgtttttctgtaggccgtgta
cctaaatgtacttttgctccatcgcgatgacttagtaaagcacatctaa
aacttttagcgttattacgtaaaaaatcttgccagctttccccttctaa
agggcaaaagtgagtatggtgcctatctaacatctcaatggctaaggcg
tcgagcaaagcccgcttattttttacatgccaatacaatgtaggctgct
ctacacctagcttctgggcgagtttacgggttgttaaaccttcgattcc
gacctcattaagcagctctaatgcgctgttaatcactttacttttatct
aatctagacatcattaattcctaatttttgttgacactctatcattgat
agagttattttaccactccctatcagtgatagagaaaagtgaactctag
aaataattttgtttaactttaagaaggagatatacatatgatcgtaaaa
cctatggtacgcaacaatatctgcctgaacgcccatcctcagggctgca
agaagggagtggaagatcagattgaatataccaagaaacgcattaccgc
agaagtcaaagctggcgcaaaagctccaaaaaacgttctggtgcttggc
tgctcaaatggttacggcctggcgagccgcattactgctgcgttcggat
acggggctgcgaccatcggcgtgtcctttgaaaaagcgggttcagaaac
caaatatggtacaccgggatggtacaataatttggcatttgatgaagcg
gcaaaacgcgagggtctttatagcgtgacgatcgacggcgatgcgtttt
cagacgagatcaaggcccaggtaattgaggaagccaaaaaaaaaggtat
caaatttgatctgatcgtatacagcttggccagcccagtacgtactgat
cctgatacaggtatcatgcacaaaagcgttttgaaaccctttggaaaaa
cgttcacaggcaaaacagtagatccgtttactggcgagctgaaggaaat
ctccgcggaaccagcaaatgacgaggaagcagccgccactgttaaagtt
atggggggtgaagattgggaacgttggattaagcagctgtcgaaggaag
gcctcttagaagaaggctgtattaccttggcctatagttatattggccc
tgaagctacccaagctttgtaccgtaaaggcacaatcggcaaggccaaa
gaacacctggaggccacagcacaccgtctcaacaaagagaacccgtcaa
tccgtgccttcgtgagcgtgaataaaggcctggtaacccgcgcaagcgc
cgtaatcccggtaatccctctgtatctcgccagcttgttcaaagtaatg
aaagagaagggcaatcatgaaggttgtattgaacagatcacgcgtctgt
acgccgagcgcctgtaccgtaaagatggtacaattccagttgatgagga
aaatcgcattcgcattgatgattgggagttagaagaagacgtccagaaa
gcggtatccgcgttgatggagaaagtcacgggtgaaaacgcagaatctc
tcactgacttagcggggtaccgccatgatttcttagctagtaacggctt
tgatgtagaaggtattaattatgaagcggaagttgaacgcttcgaccgt
atctgataagaaggagatatacatatgagagaagtagtaattgccagtg
cagctagaacagcagtaggaagttttggaggagcatttaaatcagtttc
agcggtagagttaggggtaacagcagctaaagaagctataaaaagagct
aacataactccagatatgatagatgaatctcttttagggggagtactta
cagcaggtcttggacaaaatatagcaagacaaatagcattaggagcagg
aataccagtagaaaaaccagctatgactataaatatagtttgtggttct
ggattaagatctgtttcaatggcatctcaacttatagcattaggtgatg
ctgatataatgttagttggtggagctgaaaacatgagtatgtctcctta
tttagtaccaagtgcgagatatggtgcaagaatggatgatgctgctttt
gttgattcaatgataaaagatggattatcagacatatttaataactatc
acatgggtattactgctgaaaacatagcagagcaatggaatataactag
agaagaacaagatgaattagctcttgcaagtcaaaataaagctgaaaaa
gctcaagctgaaggaaaatttgatgaagaaatagttcctgttgttataa
aaggaagaaaaggtgacactgtagtagataaagatgaatatattaagcc
tggcactacaatggagaaacttgctaagttaagacctgcatttaaaaaa
gatggaacagttactgctggtaatgcatcaggaataaatgatggtgctg
ctatgttagtagtaatggctaaagaaaaagctgaagaactaggaataga
gcctcttgcaactatagtttcttatggaacagctggtgttgaccctaaa
ataatgggatatggaccagttccagcaactaaaaaagctttagaagctg
ctaatatgactattgaagatatagatttagttgaagctaatgaggcatt
tgctgcccaatctgtagctgtaataagagacttaaatatagatatgaat
aaagttaatgttaatggtggagcaatagctataggacatccaataggat
gctcaggagcaagaatacttactacacttttatatgaaatgaagagaag
agatgctaaaactggtcttgctacactttgtataggcggtggaatggga
actactttaatagttaagagatagtaagaaggagatatacatatgaaat
tagctgtaataggtagtggaactatgggaagtggtattgtacaaacttt
tgcaagttgtggacatgatgtatgtttaaagagtagaactcaaggtgct
atagataaatgtttagctttattagataaaaatttaactaagttagtta
ctaagggaaaaatggatgaagctacaaaagcagaaatattaagtcatgt
tagttcaactactaattatgaagatttaaaagatatggatttaataata
gaagcatctgtagaagacatgaatataaagaaagatgttttcaagttac
tagatgaattatgtaaagaagatactatcttggcaacaaatacttcatc
attatctataacagaaatagcttcttctactaagcgcccagataaagtt
ataggaatgcatttctttaatccagttcctatgatgaaattagttgaag
ttataagtggtcagttaacatcaaaagttacttttgatacagtatttga
attatctaagagtatcaataaagtaccagtagatgtatctgaatctcct
ggatttgtagtaaatagaatacttatacctatgataaatgaagctgttg
gtatatatgcagatggtgttgcaagtaaagaagaaatagatgaagctat
gaaattaggagcaaaccatccaatgggaccactagcattaggtgattta
atcggattagatgttgttttagctataatgaacgttttatatactgaat
ttggagatactaaatatagacctcatccacttttagctaaaatggttag
agctaatcaattaggaagaaaaactaagataggattctatgattataat
aaataataagaaggagatatacatatgagtacaagtgatgttaaagttt
atgagaatgtagctgttgaagtagatggaaatatatgtacagtgaaaat
gaatagacctaaagcccttaatgcaataaattcaaagactttagaagaa
ctttatgaagtatttgtagatattaataatgatgaaactattgatgttg
taatattgacaggggaaggaaaggcatttgtagctggagcagatattgc
atacatgaaagatttagatgctgtagctgctaaagattttagtatctta
ggagcaaaagcttttggagaaatagaaaatagtaaaaaagtagtgatag
ctgctgtaaacggatttgctttaggtggaggatgtgaacttgcaatggc
atgtgatataagaattgcatctgctaaagctaaatttggtcagccagaa
gtaactcttggaataactccaggatatggaggaactcaaaggcttacaa
gattggttggaatggcaaaagcaaaagaattaatctttacaggtcaagt
tataaaagctgatgaagctgaaaaaatagggctagtaaatagagtcgtt
gagccagacattttaatagaagaagttgagaaattagctaagataatag
ctaaaaatgctcagcttgcagttagatactctaaagaagcaatacaact
tggtgctcaaactgatataaatactggaatagatatagaatctaattta
tttggtctttgtttttcaactaaagaccaaaaagaaggaatgtcagctt
tcgttgaaaagagagaagctaactttataaaagggtaataagaaggaga
tatacatatgAGTCAGGCGCTAAAAAATTTACTGACATTGTTAAATCTG
GAAAAAATTGAGGAAGGACTCTTTCGCGGCCAGAGTGAAGATTTAGGTT
TACGCCAGGTGTTTGGCGGCCAGGTCGTGGGTCAGGCCTTGTATGCTGC
AAAAGAGACCGTCCCTGAAGAGCGGCTGGTACATTCGTTTCACAGCTAC
TTTCTTCGCCCTGGCGATAGTAAGAAGCCGATTATTTATGATGTCGAAA
CGCTGCGTGACGGTAACAGCTTCAGCGCCCGCCGGGTTGCTGCTATTCA
AAACGGCAAACCGATTTTTTATATGACTGCCTCTTTCCAGGCACCAGAA
GCGGGTTTCGAACATCAAAAAACAATGCCGTCCGCGCCAGCGCCTGATG
GCCTCCCTTCGGAAACGCAAATCGCCCAATCGCTGGCGCACCTGCTGCC
GCCAGTGCTGAAAGATAAATTCATCTGCGATCGTCCGCTGGAAGTCCGT
CCGGTGGAGTTTCATAACCCACTGAAAGGTCACGTCGCAGAACCACATC
GTCAGGTGTGGATCCGCGCAAATGGTAGCGTGCCGGATGACCTGCGCGT
TCATCAGTATCTGCTCGGTTACGCTTCTGATCTTAACTTCCTGCCGGTA
GCTCTACAGCCGCACGGCATCGGTTTTCTCGAACCGGGGATTCAGATTG
CCACCATTGACCATTCCATGTGGTTCCATCGCCCGTTTAATTTGAATGA
ATGGCTGCTGTATAGCGTGGAGAGCACCTCGGCGTCCAGCGCACGTGGC
TTTGTGCGCGGTGAGTTTTATACCCAAGACGGCGTACTGGTTGCCTCGA
CCGTTCAGGAAGGGGTGATGCGTAATCACAATtaa

[1281] Butyrate, IL-10, IL-22, GLP-2

[1282] In certain constructs, in addition to the butyrate production pathways described above, the Escherichia coli Nissle are further engineered to produce one or more molecules selected from IL-10, IL-2, IL-22, IL-27, SOD, kyurenine, kyurenic acid, and GLP-2 using the methods described above. In some embodiments, the bacteria comprise a gene cassette for producing butyrate as described above, and a gene encoding IL-10 (see, e.g., SEQ ID NO: 134, SEQ ID NO: 193, SEQ ID NO: 197, SEQ ID NO: 198, SEQ ID NO: 194). In some embodiments, the bacteria comprise a gene cassette for producing butyrate as described above, and a gene encoding IL-2 (see, e.g., SEQ ID NO: 135). In some embodiments, the bacteria comprise a gene cassette for producing butyrate as described above, and a gene encoding IL-22 (see, e.g., SEQ ID NO: 136, SEQ ID NO: 195, SEQ ID NO: 196). In some embodiments, the bacteria comprise a gene cassette for producing butyrate as described above, and a gene encoding IL-27 (see, e.g., SEQ ID NO: 137). In some embodiments, the bacteria comprise a gene cassette for producing butyrate as described above, and a gene encoding SOD (see, e.g., SEQ ID NO: 138). In some embodiments, the bacteria comprise a gene cassette for producing butyrate as described above, and a gene encoding GLP-2 (see, e.g., SEQ ID NO: 139, SEQ ID NO: 140, SEQ ID NO: 136189, SEQ ID NO: 190, SEQ ID NO: 192). In some embodiments, the bacteria comprise a gene cassette for producing butyrate as described above, and a gene or gene cassette for producing kyurenine or kyurenic acid. In some embodiments, the bacteria comprise a gene cassette for producing butyrate as described above, and a gene encoding IL-10, IL-22, and GLP-2. In one embodiment, each of the genes or gene cassettes is placed under the control of a FNR regulatory region selected from SEQ ID NO: 141 through SEQ ID NO: 157 (Table 21 and Table 22). In an alternate embodiment, each of the genes or gene cassettes is placed under the control of an RNS-responsive regulatory region, e.g., norB, and the bacteria further comprises a gene encoding a corresponding RNS-responsive transcription factor, e.g., nsrR (see, e.g., Table 27 and elsewhere herein). In yet another embodiment, each of the genes or gene cassettes is placed under the control of an ROS-responsive regulatory region, e.g., oxyS, and the bacteria further comprises a gene encoding a corresponding ROS-responsive transcription factor, e.g., oxyR (see, e.g., Table 28 and Table 29 and elsewhere herein). In certain constructs, one or more of the genes is placed under the control of a tetracycline-inducible or constitutive promoter.

[1283] Butyrate, Propionate, IL-10, IL-22, IL-2, IL-27

[1284] In certain constructs, in addition to the butyrate production pathways described above, the Escherichia coli Nissle are further engineered to produce propionate, and one or more molecules selected from IL-10, IL-2, IL-22, IL-27, SOD, kyurenine, kyurenic acid, and GLP-2 using the methods described above. In certain constructs, in addition to the butyrate production pathways described above, the Escherichia coli Nissle are further engineered to produce propionate, and one or more molecules selected from IL-10, IL-2, and IL-22. In certain constructs, in addition to the butyrate production pathways described above, the Escherichia coli Nissle are further engineered to produce propionate, and one or more molecules selected from IL-10, IL-2, and IL-27. In some embodiments, the genetically engineered bacteria further comprise acrylate pathway genes for propionate biosynthesis, pct, lcdA, lcdB, lcdC, etfA, acrB, and acrC. In an alternate embodiment, the genetically engineered bacteria comprise pyruvate pathway genes for propionate biosynthesis, thrA^{fbr}, thrB, thrC, ilvA^{fbr}, aceE, aceF, and lpd. In another alternate embodiment, the genetically engineered bacteria comprise thrA^{fbr}, thrB, thrC, ilvA^{fbr}, aceE, aceF, lpd, and tesB.

[1285] The bacteria comprise a gene cassette for producing butyrate as described above, a gene cassette for producing propionate as described above, a gene encoding IL-10 (see, e.g., 49), a gene encoding IL-27 (see, e.g., SEQ ID NO: 137), a gene encoding IL-22 (see, e.g., SEQ ID NO: 136, SEQ ID NO: 195, SEQ ID NO: 196), and a gene encoding IL-2 (see, e.g., SEQ ID NO: 135). In one embodiment, each of the genes or gene cassettes is placed under the control of a FNR regulatory region selected from SEQ ID NOs: 141-157 (Table 21 and 22). In an alternate embodiment, each of the genes or gene cassettes is placed under the control of an RNS-responsive regulatory region, e.g., norB, and the bacteria further comprises a gene encoding a corresponding RNS-responsive transcription factor, e.g., nsrR (see, e.g., Table 23). In yet another embodiment, each of the genes or gene cassettes is placed under the control of an ROS-responsive regulatory region, e.g., oxyS, and the bacteria further comprises a gene encoding a corresponding ROS-responsive transcription factor, e.g., oxyR (see, e.g., Table 24 and elsewhere herein). In certain constructs, one or more of the genes is placed under the control of a tetracycline-inducible or constitutive promoter.

[1286] Butyrate, Propionate, IL-10, L-22, SOD, GLP-2, Kynurenine

[1287] In certain constructs, in addition to the butyrate production pathways described above, the Escherichia coli Nissle are further engineered to produce one or more molecules selected from IL-10, IL-22, SOD, GLP-2, and kynurenine using the methods described above. In certain constructs, in addition to the butyrate production pathways described above, the Escherichia coli Nissle are further engineered to produce propionate, and one or more molecules selected from IL-10, IL-22, SOD, GLP-2, and kynurenine using the methods described above. In certain constructs, in addition to the butyrate production pathways described above, the Escherichia coli Nissle are further engineered to produce IL-10, IL-27, IL-22, SOD, GLP-2, and kynurenine using the methods described above. In certain constructs, in addition to the butyrate production pathways described above, the Escherichia coli Nissle are further engineered to produce propionate, IL-10, IL-27, IL-22, SOD, GLP-2, and kynurenine using the methods described above. In some embodiments, the genetically engineered bacteria further comprise acrylate pathway genes for propionate biosynthesis, pct, lcdA, lcdB, lcdC, etfA, acrB, and acrC. In an alternate embodiment, the genetically engineered bacteria comprise pyruvate pathway genes for propionate biosynthesis, thrA^{fbr}, thrB, thrC, ilvA^{fbr}, aceE, aceF, and lpd. In another alternate embodiment, the genetically engineered bacteria comprise thrA^{fbr}, thrB, thrC, ilvA^{fbr}, aceE, aceF, lpd, and tesB.

[1288] The bacteria comprise a gene cassette for producing butyrate as described above, a gene cassette for producing propionate as described above, a gene encoding IL-10 (see, e.g., SEQ ID NO: 134), a gene encoding IL-22 (see, e.g., SEQ ID NO: 136, SEQ ID NO: 195, SEQ ID NO: 196), a gene encoding SOD (see, e.g., SEQ ID NO: 138), a gene encoding GLP-2 or a GLP-2 analog or GLP-2 polypeptide (see, e.g., SEQ ID NO: 139, SEQ ID NO:140, SEQ ID NO:189, SEQ ID NO:190, SEQ ID NO: 192), and a gene or gene cassette for producing kynurenine. In one embodiment, each of the genes or gene cassettes is placed under the control of a FNR regulatory region selected from SEQ ID NO: 141 though SEQ ID NO: 157 (Table 21 and Table 22). In an alternate embodiment, each of the genes or gene cassettes is placed under the control of an RNS-responsive regulatory region, e.g., norB, and the bacteria further comprises a gene encoding a corresponding RNS-responsive transcription factor, e.g., nsrR (see, e.g., Table 23 and elsewhere herein). In yet another embodiment, each of the genes or gene cassettes is placed under the control of an ROS-responsive regulatory region, e.g., oxyS, and the bacteria further comprises a gene encoding a corresponding ROS-responsive transcription factor, e.g., oxyR (see, e.g., Table 24 and Table 25 and elsewhere herein). In certain constructs, one or more of the genes is placed under the control of a tetracycline-inducible or constitutive promoter.

[1289] Butyrate, Propionate, IL-10, IL-27, IL-22, IL-2, SOD, GLP-2, Kynurenine

[1290] In certain constructs, in addition to the butyrate production pathways described above, the Escherichia coli Nissle are further engineered to produce one or more molecules selected from IL-10, IL-27, IL-22, IL-2, SOD, GLP-2, and kynurenine using the methods described above. In certain constructs, in addition to the butyrate production pathways described above, the Escherichia coli Nissle are further engineered to produce propionate and one or more molecules selected from IL-10, IL-27, IL-22, IL-2, SOD, GLP-2, and kynurenine using the methods described above. In certain constructs, in addition to the butyrate production pathways described above, the Escherichia coli Nissle are further engineered to produce IL-10, IL-27, IL-22, SOD, GLP-2, and kynurenine using the methods described above. In some embodiments, the genetically engineered bacteria further comprise acrylate pathway genes for propionate biosynthesis, pct, lcdA, lcdB, lcdC, etfA, acrB, and acrC. In an alternate embodiment, the genetically engineered bacteria comprise pyruvate pathway genes for propionate biosynthesis, thrA^{fbr}, thrB, thrC, ilvA^{fbr}, aceE, aceF, and lpd. In another alternate embodiment, the genetically engineered bacteria comprise thrA^{fbr}, thrB, thrC, ilvA^{fbr}, aceE, aceF, lpd, and tesB.

[1291] The bacteria comprise a gene cassette for producing butyrate as described above, a gene cassette for producing propionate as described above, a gene encoding IL-10 (see, e.g., SEQ ID NO: 134, SEQ ID NO: 193, SEQ ID NO: 197, SEQ ID NO: 198, SEQ ID NO: 194), a gene encoding IL-27 (see, e.g., SEQ ID NO: 137), a gene encoding IL-22 (see, e.g., SEQ ID NO: 51), a gene encoding IL-2 (see, e.g., SEQ ID NO: 50), a gene encoding SOD (see, e.g., SEQ ID NO: 53), a gene encoding GLP-2 (see, e.g., SEQ ID NO: 54), and a gene or gene cassette for producing kynurenine. In one embodiment, each of the genes or gene cassettes is placed under the control of a FNR regulatory region selected from SEQ ID NO: 141 through SEQ ID NO: 157 (Table 21 and Table 22). In an alternate embodiment, each of the genes or gene cassettes is placed under the control of an RNS-responsive regulatory region, e.g., norB, and the bacteria further comprises a gene encoding a corresponding RNS-responsive transcription factor, e.g., nsrR (see, e.g., Table 23 and Table 24 and elsewhere herein). In yet another embodiment, each of the genes or gene cassettes is placed under the control of an ROS-responsive regulatory region, e.g., oxyS, and the bacteria further comprises a gene encoding a corresponding ROS-responsive transcription factor, e.g., oxyR (see, e.g., Table 24 and Table 25 and elsewhere herein). In certain constructs, one or more of the genes is placed under the control of a tetracycline-inducible or constitutive promoter.

[1292] In some embodiments, bacterial genes may be disrupted or deleted to produce an auxotrophic strain. These include, but are not limited to, genes required for oligonucleotide synthesis, amino acid synthesis, and cell wall synthesis, as shown in Table 33.

### Example 3. Transforming E. coli

[1293] Each plasmid is transformed into E. coli Nissle or E. coli DH5a. All tubes, solutions, and cuvettes are pre-chilled to 4° C. An overnight culture of E. coli Nissle or E. coli DH5a is diluted 1:100 in 5 mL of lysogeny broth (LB) and grown until it reached an OD₆₀₀ of 0.4-0.6. The cell culture medium contains a selection marker, e.g., ampicillin, that is suitable for the plasmid. The E. coli cells are then centrifuged at 2,000 rpm for 5 min. at 4° C., the supernatant is removed, and the cells are resuspended in 1 mL of 4° C. water. The E. coli are again centrifuged at 2,000 rpm for 5 min. at 4° C., the supernatant is removed, and the cells are resuspended in 0.5 mL of 4° C. water. The E. coli are again centrifuged at 2,000 rpm for 5 min. at 4° C., the supernatant is removed, and the cells are finally resuspended in 0.1 mL of 4° C. water. The electroporator is set to 2.5 kV. 0.5 μg of one of the above plasmids is added to the cells, mixed by pipetting, and pipetted into a sterile, chilled cuvette. The dry cuvette is placed into the sample chamber, and the electric pulse is applied. One mL of room-temperature SOC media is immediately added, and the mixture is transferred to a culture tube and incubated at 37° C. for 1 hr. The cells are spread out on an LB plate containing ampicillin and incubated overnight.

[1294] In alternate embodiments, the butyrate cassette can be inserted into the Nissle genome through homologous recombination (Genewiz, Cambridge, Mass.). Organization of the constructs and nucleotide sequences are provided herein. Organization of the constructs and nucleotide sequences are shown in FIG. 2. To create a vector capable of integrating the synthesized butyrate cassette construct into the chromosome, Gibson assembly was first used to add 1000 bp sequences of DNA homologous to the Nissle lacZ locus into the R6K origin plasmid pKD3. This targets DNA cloned between these homology arms to be integrated into the lacZ locus in the Nissle genome. Gibson assembly was used to clone the fragment between these arms. PCR was used to amplify the region from this plasmid containing the entire sequence of the homology arms, as well as the butyrate cassette between them. This PCR fragment was used to transform electrocompetent Nissle-pKD46, a strain that contains a temperature-sensitive plasmid encoding the lambda red recombinase genes. After transformation, cells were grown out for 2 hours before plating on chloramphenicol at 20 ug/mL at 37 degrees C. Growth at 37 degrees C. also cures the pKD46 plasmid. Transformants containing cassette were chloramphenicol resistant and lac-minus (lac-).

### Example 4. Production of Butyrate in Recombinant E. coli Using Tet-Inducible Promoter

[1295] Production of butyrate was assessed in E. coli Nissle strains containing butyrate cassettes described above in order to determine the effect of oxygen on butyrate production. The tet-inducible cassettes tested include (1) tet-butyrate cassette comprising all eight genes (pLOGIC031); (2) tet-butyrate cassette in which the ter is substituted (pLOGIC046) and (3) tet-butyrate cassette in which tesB is substituted in place of pbt and buk genes.

[1296] All incubations are performed at 37° C. Cultures of E. coli strains DH5a and Nissle transformed with the butyrate cassettes are grown overnight in LB and then diluted 1:200 into 4 mL of M9 minimal medium containing 0.5% glucose. The cells were grown with shaking (250 rpm) for 4-6 h and incubated aerobically or anaerobically in a Coy anaerobic chamber (supplying 90% N₂, 5% CO₂, 5% H2). One mL culture aliquots were prepared in 1.5 mL capped tubes and incubated in a stationary incubator to limit culture aeration. One tube is removed at each time point (0, 1, 2, 4, and 20 hours) and analyzed for butyrate concentration by LC-MS to confirm that butyrate production in these recombinant strains can be achieved in a low-oxygen environment.

[1297] FIG. 11 depicts bar graphs of butyrate production using the different butyrate-producing circuits shown in FIG. 2.

[1298] FIG. 11A shows butyrate production in strains pLOGIC031 and pLOGIC046 in the presence and absence of oxygen, in which there is no significant difference in butyrate production. Enhanced butyrate production was shown in Nissle in low copy plasmid expressing pLOGIC046 which contain a deletion of the final two genes (ptb-buk) and their replacement with the endogenous E. coli tesB gene (a thioesterase that cleaves off the butyrate portion from butyryl CoA).

### Example 5. Tet-Driven and RNS Driven In Vitro Butyrate Production in Recombinant E. coli

[1299] All incubations were performed at 37 C. Lysogeny broth (LB)-grown overnight cultures of E. coli Nissle transformed with pLogic031 or pLogic046 were subcultured 1:100 into 10 mL of M9 minimal medium containing 0.5% glucose and grown shaking (200 rpm) for 2 h, at which time anhydrous tetracycline (ATC) was added to cultures at a concentration of 100 ng/mL to induce expression the butyrate operon from pLogic031 or pLogic046. After 2 hours of induction, cells were spun down, supernatant was discarded, and the cells were resuspended in M9 minimal media containing 0.5% glucose. Culture supernatant was then analyzed at indicated time points ((0 up to 24 hours, as shown in FIG. 21) to assess levels of butyrate production by LC-MS. As seen in FIG. 21 butyrate production is greater in the strain comprising the pLogic046 construct than the strain comprising the pLogic03 construct.

[1300] Production of butyrate was also assessed in E. coli Nissle strains containing the butyrate cassettes driven by an RNS promoter described above (pLogic031-nsrR-norB-butyrate operon construct and pLogic046-nsrR-norB-butyrate operon construct) in order to determine the effect of nitrogen on butyrate production. Overnight bacterial cultures were diluted 1:100 into fresh LB and grown for 1.5 hrs to allow entry into early log phase. At this point, long half-life nitric oxide donor (DETA-NO; diethylenetriamine-nitric oxide adduct) was added to cultures at a final concentration of 0.3 mM to induce expression from plasmid. After 2 hours of induction, cells were spun down, supernatant was discarded, and the cells were resuspended in M9 minimal media containing 0.5% glucose. Culture supernatant was then analyzed at indicated time points (0 up to 24 hours, as shown in FIG. 22) to assess levels of butyrate production. As seen in FIG. 22, genetically engineered Nissle comprising pLogic031-nsrR-norB-butyrate operon construct) or (pLogic046-nsrR-norB-butyrate operon construct) produced significantly more butyrate as compared to wild-type Nissle.

### Example 6. In Vitro Production of Butyrate in Recombinant E. coli Using an Inducible Tet Promoter Butyrate Circuit

[1301] NuoB is a protein complex involved in the oxidation of NADH during respiratory growth (form of growth requiring electron transport). Preventing the coupling of NADH oxidation to electron transport allows an increase in the amount of NADH being used to support butyrate production. To test whether Preventing the coupling of NADH oxidation to electron transport would allow increased butyrate production, NuoB mutants having NuoB deletion were obtained.

[1302] All incubations were performed at 37° C. Lysogeny broth (LB)-grown overnight cultures of E. coli strains DH5a and Nissle containing pLogic031 or pLogic046 were subcultured 1:100 into 10 mL of M9 minimal medium containing 0.2% glucose and grown shaking (200 rpm) for 2 h, at which time anhydrous tetracycline (ATC) was added to cultures at a concentration of 100 ng/mL to induce expression the butyrate operon from pLogic031 or pLogic046. Cultures were incubated either shaking in flasks (+O₂) or in the anaerobic chamber (−O₂) and samples were removed, and butyrate was quantitated at 2, 4, and 24 hr via LC-MS. See FIG. 13, which depicts a graph of butyrate production using different butyrate-producing circuits comprising a nuoB gene deletion. FIG. 13 shows the BW25113 strain of E. coli, which is a common cloning strain and the background of the KEIO collection of E. coli mutants. FIG. 13 shows that compared with wild-type Nissle, deletion of NuoB results in greater production of butyrate.

### Example 7. Production of Butyrate in Recombinant E. coli

[1303] In vitro production of butyrate under the control of a tetracycline promoter was compared between (1) Butyrate gene cassette (pLOGIC046-ter-thiA1-hbd-crt2-pbt buk butyrate) and (2) butyrate cassette in which the pbt and buk genes were placed with tesB (pLOGIC046-deltapbt-buk/tesB+-butyrate; SEQ ID NO: 56).

[1304] Overnight bacterial cultures were diluted 1:100 into fresh LB and grown for 1.5 hrs to allow entry into early log phase. At this point, anhydrous tetracycline (ATC) was added to cultures at a final concentration of 100 ng/mL to induce expression of butyrate genes from plasmid. After 2 hours of induction, cells were spun down, supernatant was discarded, and the cells were resuspended in M9 minimal media containing 0.5% glucose. Culture supernatant was then analyzed at indicated time points to assess levels of butyrate production. As shown in FIG. 11B, replacement of pbt and buk with tesB leads to greater levels of butyrate production.

### Example 8. Construction of Vectors for Overproducing Butyrate (FNR Driven)

[1305] The three butyrate cassettes described in Example 1 (see, e.g., Table 36, SEQ ID NO: 163, SEQ ID NO: 164, SEQ ID NO: 165) are placed under the control of a FNR regulatory region selected from (SEQ ID NO: 141 through SEQ ID NO: 157) (Table 21 and Table 22) In certain constructs, the FNR-responsive promoter is further fused to a strong ribosome binding site sequence. For efficient translation of butyrate genes, each synthetic gene in the operon was separated by a 15 base pair ribosome binding site derived from the T7 promoter/translational start site. In certain embodiments, a ydfZ promoter was used. In other embodiments, a FNRS promoter is used.

### Example 9. FNR and RNS Driven In Vitro Production of Butyrate in Recombinant E. coli

[1306] Production of butyrate is assessed in E. coli Nissle strains containing the butyrate cassettes described above driven by an FNR promoter in order to determine the effect of oxygen on butyrate production. All incubations are performed at 37° C. Cultures of E. coli strains DH5a and Nissle transformed with the butyrate cassettes are grown overnight in LB and then diluted 1:200 into 4 mL of M9 minimal medium containing 0.5% glucose. The cells are grown with shaking (250 rpm) for 4-6 h and incubated aerobically or anaerobically in a Coy anaerobic chamber (supplying 90% N₂, 5% CO₂, 5% H₂). One mL culture aliquots are prepared in 1.5 mL capped tubes and incubated in a stationary incubator to limit culture aeration. One tube is removed at each time point (0, 1, 2, 4, and 20 hours) and analyzed for butyrate concentration by LC-MS to confirm that butyrate production in these recombinant strains can be achieved in a low-oxygen environment.

[1307] In an alternate embodiment, production of butyrate is assessed in E. coli Nissle strains containing the butyrate cassettes described above driven by an RNS promoter in order to determine the effect of nitrogen on butyrate production. Overnight bacterial cultures are diluted 1:100 into fresh LB and grown for 1.5 hrs to allow entry into early log phase. At this point, long half-life nitric oxide donor (DETA-NO; diethylenetriamine-nitric oxide adduct) is added to cultures at a final concentration of 0.3 mM to induce expression from plasmid. After 2 hours of induction, cells are spun down, supernatant is discarded, and the cells are resuspended in M9 minimal media containing 0.5% glucose. Culture supernatant is then analyzed at indicated time points to assess levels of butyrate production.

### Example 10. Production of Butyrate in Recombinant E. coli

[1308] The effect of oxygen and glucose on FNR promoter driven butyrate production was compared between E. coli Nissle strains SYN501 (comprises pSC101 PydfZ-ter butyrate plasmid, i.e., (ter-thiA1-hbd-crt2-pbt-buk genes under the control of a ydfZ promoter) SYN-UCD500 (comprises pSC101 PydfZ-bcd butyrate plasmid, i.e, bcd2, etfB3, etfA3, thiA1, hbd, crt2, pbt, and buk under control of the ydfZ promoter) and SYN-UCD506 (comprises pSC101 nirB-bcd butyrate plasmid, i.e., i.e, bcd2, etfB3, etfA3, thiA1, hbd, crt2, pbt, and buk under control of the nirB promoter.

[1309] All incubations were performed at 37° C. Cultures of E. coli Nissle strains transformed with the butyrate cassettes were grown overnight in LB and then diluted 1:200 into 4 mL of M9 minimal medium containing 0.5% glucose. The cells were grown with shaking (250 rpm) for 4-6 h and incubated anaerobically in a Coy anaerobic chamber (supplying 90% N₂, 5% CO₂, 5% H₂) for 4 hours. Cells were washed and resuspended in minimal media w/0.5% glucose and incubated microaerobically to monitor butyrate production over time. One aliquot was removed at each time point (2, 8, and 24 hours) and analyzed for butyrate concentration by LC-MS to confirm that butyrate production in these recombinant strains can be achieved in a low-oxygen environment. As seen in FIG. 14B, SYN-501 led to significant butyrate production under anaerobic conditions.

[1310] In some embodiments, genetically engineered bacteria comprise a nucleic acid sequence that is at least about 80%, at least about 85%, at least about 90%, at least about 95%, or at least about 99% homologous to the DNA sequence of SEQ ID NO: 175, 176, 177, or 178, or a functional fragment thereof.

TABLE 47
ydfZ-butyrate cassettes

| | | SEQ ID |
|---|---|---|
| Description | Sequence | NO |
| YdfZ | CATTTCCTCTCATCCCATCCGGGGTGAGAGTCTTTT | SEQ ID |
| promoter | CCCCCGACTTATGGCTCATGCATGCATCAAAAAAG | NO: 175 |
| | ATGTGAGCTTGATCAAAAACAAAAAATATTTCACTC | |
| | GACAGGAGTATTTATATTGCGCCCGGATCCCTCTAG | |
| | AAATAATTTTGTTTAACTTTAAGAAGGAGATATACA | |
| | T | |
| YdfZ-bcd2- | CATTTCCTCTCATCCCATCCGGGGTGAGAGTCTTTT | SEQ ID |
| etfB3-etfA3- | CCCCCGACTTATGGCTCATGCATGCATCAAAAAAG | NO: 176 |
| thiA1-hb- | ATGTGAGCTTGATCAAAAACAAAAAATATTTCACTC | |
| crt2-pbt-buk | GACAGGAGTATTTATATTGCGCCCGGATCCCTCTAG | |
| butyrate | AAATAATTTTGTTTAACTTTAAGAAGGAGATATACA | |
| cassette | T | |
| | atggatttaaattctaaaaaatatcagatgcttaaagagctatatgtaagcttcgctgaaa | |
| | atgaagttaaacctttagcaacagaacttgatgaagaagaaagatttccttatgaaaca | |
| | gtggaaaaaatggcaaaagcaggaatgatgggtataccatatccaaaagaatatggt | |
| | ggagaaggtggagacactgtaggatatataatggcagttgaagaattgtctagagttt | |
| | gtggtactacaggagttatattatcagctcatacatctcttggctcatggcctatatatca | |
| | atatggtaatgaagaacaaaaacaaaaattcttaagaccactagcaagtggagaaaa | |
| | attaggagcatttggtcttactgagcctaatgctggtacagatgcgtctggccaacaaa | |
| | caactgctgttttagacggggatgaatacatacttaatggctcaaaaatatttataacaa | |
| | acgcaatagctggtgacatatatgtagtaatggcaatgactgataaatctaaggggaa | |
| | caaaggaatatcagcatttatagttgaaaaaggaactcctgggtttagctttggagttaa | |
| | agaaaagaaaatgggtataagaggttcagctacgagtgaattaatatttgaggattgca | |
| | gaatacctaaagaaaatttacttggaaaagaaggtcaaggatttaagatagcaatgtct | |
| | actcttgatggtggtagaattggtatagctgcacaagctttaggtttagcacaaggtgct | |
| | cttgatgaaactgttaaatatgtaaaagaaagagtacaatttggtagaccattatcaaaa | |
| | ttccaaaatacacaattccaattagctgatatggaagttaaggtacaagcggctagaca | |
| | ccttgtatatcaagcagctataaataaagacttaggaaaaccttatggagtagaagcag | |
| | caatggcaaaattatttgcagctgaaacagctatggaagttactacaaaagctgtacaa | |
| | cttcatggaggatatggatacactcgtgactatccagtagaaagaatgatgagagatg | |
| | ctaagataactgaaatatatgaaggaactagtgaagttcaaagaatggttatttcagga | |
| | aaactattaaaatagtaagaaggagatatacatatggaggaaggatttatgaatatagt | |
| | cgtttgtataaaacaagttccagatacaacagaagttaaactagatcctaatacaggta | |
| | ctttaattagagatggagtaccaagtataataaaccctgatgataaagcaggatagaa | |
| | gaagctataaaattaaaagaagaaatgggtgctcatgtaactgttataacaatgggacc | |
| | tcctcaagcagatatggctttaaaagaagctttagcaatgggtgcagatagaggtatat | |
| | tattaacagatagagcatttgcgggtgctgatacttgggcaacttcatcagcattagca | |
| | ggagcattaaaaaatatagattttgatattataatagctggaagacaggcgatagatgg | |
| | agatactgcacaagttggacctcaaatagctgaacatttaaatcttccatcaataacata | |
| | tgctgaagaaataaaaactgaaggtgaatatgtattagtaaaaagacaatttgaagatt | |
| | gttgccatgacttaaaagttaaaatgccatgccttataacaactcttaaagatatgaaca | |
| | caccaagatacatgaaagttggaagaatatatgatgctttcgaaaatgatgtagtagaa | |
| | acatggactgtaaaagatatagaagttgacccttctaatttaggtcttaaaggttctccaa | |
| | ctagtgtatttaaatcatttacaaaatcagttaaaccagctggtacaatatacaatgaaga | |
| | tgcgaaaacatcagctggaattatcatagataaattaaaagagaagtatatcatataata | |
| | agaaggagatatacatatgggtaacgttttagtagtaatagaacaaagagaaaatgta | |
| | attcaaactgtttctttagaattactaggaaaggctacagaaatagcaaaagattatgat | |
| | acaaaagtttctgcattacttttaggtagtaaggtagaaggtttaatagatacattagcac | |
| | actatggtgcagatgaggtaatagtagtagatgatgaagctttagcagtgtatacaact | |
| | gaaccatatacaaaagcagcttatgaagcaataaaagcagctgaccctatagttgtatt | |
| | atttggtgcaacttcaataggtagagatttagcgcctagagtactgctagaatacatac | |
| | aggtcttactgctgactgtacaggtcttgcagtagctgaagatacaaaattattattaatg | |
| | acaagacctgcctttggtggaaatataatggcaacaatagtttgtaaagatttcagacct | |
| | caaatgtctacagttagaccaggggttatgaagaaaaatgaacctgatgaaactaaag | |
| | aagctgtaattaaccgtttcaaggtagaatttaatgatgctgataaattagttcaagttgta | |
| | caagtaataaaagaagctaaaaaacaagttaaaatagaagatgctaagatattagtttc | |
| | tgctggacgtggaatgggtggaaaagaaaacttagacatactttatgaattagctgaaa | |
| | ttataggtggagaagtttctggttctcgtgccactatagatgcaggttggttagataaag | |
| | caagacaagttggtcaaactggtaaaactgtaagaccagacattatatagcatgtggt | |
| | atatctggagcaatacaacatatagctggtatggaagatgctgagtttatagttgctata | |
| | aataaaaatccagaagctccaatatttaaatatgctgatgttggtatagttggagatgttc | |
| | ataaagtgcttccagaacttatcagtcagttaagtgttgcaaaagaaaaaggtgaagttt | |
| | tagctaactaataagaaggagatatacatatgagagaagtagtaattgccagtgcagc | |
| | tagaacagcagtaggaagttttggaggagcatttaaatcagtttcagcggtagagttag | |
| | gggtaacagcagctaaagaagctataaaaagagctaacataactccagatatgatag | |
| | atgaatctcttttagggggagtacttacagcaggtcttggacaaaatatagcaagacaa | |
| | atagcattaggagcaggaataccagtagaaaaaccagctatgactataaatatagtttg | |
| | tggttctggattaagatctgtttcaatggcatctcaacttatagcattaggtgatgctgata | |
| | taatgttagttggtggagctgaaaacatgagtatgtctccttatttagtaccaagtgcga | |
| | gatatggtgcaagaatgggtgatgctgcttttgttgattcaatgataaaagatggattatc | |
| | agacatatttaataactatcacatgggtattactgctgaaaacatagcagagcaatgga | |
| | atataactagagaagaacaagatgaattagctcttgcaagtcaaaataaagctgaaaa | |
| | agctcaagctgaaggaaaatttgatgaagaaatagttcctgttgttataaaaggaagaa | |
| | aaggtgacactgtagtagataaagatgaatatattaagcctggcactacaatggagaa | |
| | acttgctaagttaagacctgcatttaaaaaagatggaacagttactgctggtaatgcatc | |
| | aggaataaatgatggtgctgctatgttagtagtaatggctaaagaaaaagctgaagaa | |
| | ctaggaatagagcctcttgcaactatagtttcttatggaacagctggtgttgaccctaaa | |
| | ataatgggatatggaccagttccagcaactaaaaaagctttagaagctgctaatatgac | |
| | tattgaagatatagatttagttgaagctaatgaggcatttgctgcccaatctgtagctgta | |
| | ataagagacttaaatatagatatgaataaagttaatgttaatggtggagcaatagctata | |
| | ggacatccaataggatgctcaggagcaagaatacttactacacttttatatgaaatgaa | |
| | gagaagagatgctaaaactggtcttgctacactttgtataggcggtggaatgggaact | |
| | actttaatagttaagagatagtaagaaggagatatacatatgaaattagctgtaataggt | |
| | agtggaactatgggaagtggtattgtacaaacttttgcaagttgtggacatgatgtatgtt | |
| | taaagagtagaactcaaggtgctatagataaatgtttagctttattagataaaaatttaact | |
| | aagttagttactaagggaaaaatggatgaagctacaaaagcagaaatattaagtcatgt | |
| | tagttcaactactaattatgaagatttaaaagatatggatttaataatagaagcatctgtag | |
| | aagacatgaatataaagaaagatgttttcaagttactagatgaattatgtaaagaagata | |
| | ctatcttggcaacaaatacttcatcattatctataacagaaatagcttcttctactaagcgc | |
| | ccagataaagttataggaatgcatttctttaatccagttcctatgatgaaattagttgaagt | |
| | tataagtggtcagttaacatcaaaagttacttttgatacagtatttgaattatctaagagtat | |
| | caataaagtaccagtagatgtatctgaatctcctggatttgtagtaaatagaatacttata | |
| | cctatgataaatgaagctgttggtatatatgcagatggtgttgcaagtaaagaagaaat | |
| | agatgaagctatgaaattaggagcaaaccatccaatgggaccactagcattaggtgat | |
| | ttaatcggattagatgttgttttagctataatgaacgttttatatactgaatttggagatacta | |
| | aatatagacctcatccacttttagctaaaatggttagagctaatcaattaggaagaaaaa | |
| | ctaagataggattctatgattataataaataataagaaggagatatacatatgagtacaa | |
| | gtgatgttaaagtttatgagaatgtagctgttgaagtagatggaaatatatgtacagtga | |
| | aaatgaatagacctaaagcccttaatgcaataaattcaaagactttagaagaactttatg | |
| | aagtatttgtagatattaataatgatgaaactattgatgttgtaatattgacaggggaagg | |
| | aaaggcatttgtagctggagcagatattgcatacatgaaagatttagatgctgtagctg | |
| | ctaaagattttagtatcttaggagcaaaagcttttggagaaatagaaaatagtaaaaaa | |
| | gtagtgatagctgctgtaaacggatttgctttaggtggaggatgtgaacttgcaatggc | |
| | atgtgatataagaattgcatctgctaaagctaaatttggtcagccagaagtaactcttgg | |
| | aataactccaggatatggaggaactcaaaggcttacaagattggttggaatggcaaaa | |
| | gcaaaagaattaatctttacaggtcaagttataaaagctgatgaagctgaaaaaatagg | |
| | gctagtaaatagagtcgttgagccagacattttaatagaagaagttgagaaattagcta | |
| | agataatagctaaaaatgctcagcttgcagttagatactctaaagaagcaatacaactt | |
| | ggtgctcaaactgatataaatactggaatagatatagaatctaatttatttggtctttgttttt | |
| | caactaaagaccaaaaagaaggaatgtcagctttcgttgaaaagagagaagctaactt | |
| | tataaaagggtaataagaaggagatatacatatgagaagttttgaagaagtaattaagtt | |
| | tgcaaaagaaagaggacctaaaactatatcagtagcatgttgccaagataaagaagtt | |
| | ttaatggcagttgaaatggctagaaaagaaaaaatagcaaatgccattttagtaggag | |
| | atatagaaaagactaaagaaattgcaaaaagcatagacatggatatcgaaaattatga | |
| | actgatagatataaaagatttagcagaagcatctctaaaatctgttgaattagtttcacaa | |
| | ggaaaagccgacatggtaatgaaaggcttagtagacacatcaataatactaaaagca | |
| | gttttaaataaagaagtaggtcttagaactggaaatgtattaagtcacgtagcagtatttg | |
| | atgtagagggatatgatagattatttttcgtaactgacgcagctatgaacttagctcctga | |
| | tacaaatactaaaaagcaaatcatagaaaatgcttgcacagtagcacattcattagatat | |
| | aagtgaaccaaaagttgctgcaatatgcgcaaaagaaaaagtaaatccaaaaatgaa | |
| | agatacagttgaagctaaagaactagaagaaatgtatgaaagaggagaaatcaaag | |
| | gttgtatggttggtgggccttttgcaattgataatgcagtatctttagaagcagctaaaca | |
| | taaaggtataaatcatcctgtagcaggacgagctgatatattattagccccagatattga | |
| | aggtggtaacatattatataaagctttggtattcttctcaaaatcaaaaaatgcaggagtt | |
| | atagttggggctaaagcaccaataatattaacttctagagcagacagtgaagaaacta | |
| | aactaaactcaatagattaggtgttttaatggcagcaaaggcataataagaaggagat | |
| | atacatatgagcaaaatatttaaaatcttaacaataaatcctggttcgacatcaactaaaa | |
| | tagctgtatttgataatgaggatttagtatttgaaaaaactttaagacattcttcagaagaa | |
| | ataggaaaatatgagaaggtgtctgaccaatttgaatttcgtaaacaagtaatagaaga | |
| | agctctaaaagaaggtggagtaaaaacatctgaattagatgctgtagtaggtagagga | |
| | ggacttcttaaacctataaaaggtggtacttattcagtaagtgctgctatgattgaagattt | |

| | | |
|---|---|---|
| | acgcttcaaacctaggtggaataatagcaaaaca | |
| | aataggtgaagaagtaaatgttccttcatacatagtagaccctgttgttgtagatgaatta | |
| | gaagatgttgctagaatttctggtatgcctgaaataagtagagcaagtgtagtacatgct | |
| | ttaaatcaaaaggcaatagcaagaagatatgctagagaaataaacaagaaatatgaa | |
| | gatataaatcttatagttgcacacatgggtggaggagtttctgttggagctcataaaaat | |
| | ggtaaaatagtagatgttgcaaacgcattagatggagaaggacctttctctccagaaa | |
| | gaagtggtggactaccagtaggtgcattagtaaaaatgtgctttagtggaaaatatact | |
| | caagatgaaattaaaaagaaaataaaaggtaatggcggactagttgcatacttaaaca | |
| | ctaatgatgctagagaagttgaagaaagaattgaagctggtgatgaaaaagctaaatt | |
| | agtatatgaagctatggcatatcaaatctctaaagaaataggagctagtgctgcagttct | |
| | taagggagatgtaaaagcaatattattaactggtggaatcgcatattcaaaaatgtttac | |
| | agaaatgattgcagatagagttaaatttatagcagatgtaaaagtttatccaggtgaaga | |
| | tgaaatgattgcattagctcaaggtggacttagagttttaactggtgaagaagaggctc | |
| | aagtttatgataactaataa | |
| YdfZ-ter- | CATTTCCTCTCATCCCATCCGGGGTGAGAGTCTTTT | SEQ ID |
| thiA1-hbd- | CCCCCGACTTATGGCTCATGCATGCATCAAAAAAG | NO: 177 |
| crt2-pbt-buk | ATGTGAGCTTGATCAAAAACAAAAAATATTTCACTC | |
| | GACAGGAGTATTTATATTGCGCCCGGATCCCTCTAG | |
| | AAATAATTTTGTTTAACTTTAAGAAGGAGATATACA | |
| | Tatgatcgtaaaacctatggtacgcaacaatatctgcctgaacgcccatcctcagggc | |
| | tgcaagaagggagtggaagatcagattgaatataccaagaaacgcattaccgcaga | |
| | agtcaaagctggcgcaaaagctccaaaaaacgttctggtgcttggctgctcaaatggt | |
| | tacggcctggcgagccgcattactgctgcgttcggatacggggctgc gaccatcggc | |
| | gtgtcctttgaaaaagcgggttcagaaaccaaatatggtacaccgggatggtacaata | |
| | atttggcatttgatgaagcggcaaaacgcgagggtattatagcgtgacgatcgacgg | |
| | cgatgcgttttcagacgagatcaaggcccaggtaattgaggaagccaaaaaaaaag | |
| | gtatcaaatttgatctgatcgtatacagcttggccagcccagtacgtactgatcctgata | |
| | caggtatcatgcacaaaagcgttttgaaaccctttggaaaaacgttcacaggcaaaac | |
| | agtagatccgtttactggcgagctgaaggaaatctccgcggaaccagcaaatgacga | |
| | ggaagcagccgccactgttaaagttatggggggtgaagattgggaacgttggattaa | |
| | gcagctgtcgaaggaaggcctcttagaagaaggctgtattaccttggcctatagttata | |
| | ttggccctgaagctacccaagctttgtaccgtaaaggcacaatcggcaaggccaaag | |
| | aacacctggaggccacagcacaccgtctcaacaaagagaacccgtcaatccgtgcc | |
| | ttcgtgagcgtgaataaaggcctggtaacccgcgcaagcgccgtaatcccggtaatc | |
| | cctctgtatctcgccagcttgttcaaagtaatgaaagagaagggcaatcatgaaggttg | |
| | tattgaacagatcacgcgtctgtacgccgagcgcctgtaccgtaaagatggtacaatt | |
| | ccagttgatgaggaaaatcgcattcgcattgatgattgggagttagaagaagacgtcc | |
| | agaaagcggtatccgcgttgatggagaaagtcacgggtgaaaacgcagaatctctca | |
| | ctgacttagcggggtaccgccatgatttcttagctagtaacggattgatgtagaaggta | |
| | ttaattatgaagcggaagttgaacgcttcgaccgtatctgataagaaggagatatacat | |
| | atgagagaagtagtaattgccagtgcagctagaacagcagtaggaagttttggagga | |
| | gcatttaaatcagtttcagcggtagagttaggggtaacagcagctaaagaagctataa | |
| | aaagagctaacataactccagatatgatagatgaatctcttttagggggagtacttaca | |
| | gcaggtcttggacaaaatatagcaagacaaatagcattaggagcaggaataccagta | |
| | gaaaaaccagctatgactataaatatagtttgtggttctggattaagatctgtttcaatgg | |
| | catctcaacttatagcattaggtgatgctgatataatgttagttggtggagctgaaaacat | |
| | gagtatgtctccttatttagtaccaagtgcgagatatggtgcaagaatgggtgatgctg | |
| | cttttgttgattcaatgataaaagatggattatcagacatatttaataactatcacatgggt | |
| | attactgctgaaaacatagcagagcaatggaatataactagagaagaacaagatgaat | |
| | tagctcttgcaagtcaaaataaagctgaaaaagctcaagctgaaggaaaatttgatga | |
| | agaaatagttcctgttgttataaaaggaagaaaaggtgacactgtagtagataaagatg | |
| | aatatattaagcctggcactacaatggagaaacttgctaagttaagacctgcatttaaaa | |
| | aagatggaacagttactgctggtaatgcatcaggaataaatgatggtgctgctatgtta | |
| | gtagtaatggctaaagaaaaagctgaagaactaggaatagagcctcttgcaactatag | |
| | tttcttatggaacagaggtgttgaccctaaaataatgggatatggaccagttccagcaa | |
| | ctaaaaaagctttagaagctgctaatatgactattgaagatatagatttagttgaagctaa | |
| | tgaggcatttgctgcccaatctgtagctgtaataagagacttaaatatagatatgaataa | |
| | agttaatgttaatggtggagcaatagctataggacatccaataggatgctcaggagca | |
| | agaatacttactacacttttatatgaaatgaagagaagagatgctaaaactggtcttgct | |
| | acactttgtataggcggtggaatgggaactactttaatagttaagagatagtaagaagg | |
| | agatatacatatgaaattagctgtaataggtagtggaactatgggaagtggtattgtaca | |
| | aacttttgcaagttgtggacatgatgtatgtttaaagagtagaactcaaggtgctatagat | |
| | aaatgtttagctttattagataaaaatttaactaagttagttactaagggaaaaatggatg | |
| | aagctacaaaagcagaaatattaagtcatgttagttcaactactaattatgaagatttaaa | |
| | agatatggatttaataatagaagcatctgtagaagacatgaatataaagaaagatgtttt | |
| | caagttactagatgaattatgtaaagaagatactatcttggcaacaaatacttcatcatta | |
| | tctataacagaaatagcttcttctactaagcgcccagataaagttataggaatgcatttct | |
| | ttaatccagttcctatgatgaaattagttgaagttataagtggtcagttaacatcaaaagtt | |
| | acttttgatacagtatttgaattatctaagagtatcaataaagtaccagtagatgtatctga | |
| | atctcaggatttgtagtaaatagaatacttatacctatgataaatgaagctgttggtatat | |
| | atgcagatggtgttgcaagtaaagaagaaatagatgaagctatgaaattaggagcaa | |
| | accatccaatgggaccactagcattaggtgatttaatcggattagatgttgttttagctat | |
| | aatgaacgttttatatactgaatttggagatactaaatatagacctcatccacttttagcta | |
| | aaatggttagagctaatcaattaggaagaaaaactaagataggattctatgattataata | |
| | aataataagaaggagatatacatatgagtacaagtgatgttaaagtttatgagaatgtag | |
| | ctgttgaagtagatggaaatatatgtacagtgaaaatgaatagacctaaagcccttaat | |
| | gcaataaattcaaagactttagaagaactttatgaagtatttgtagatattaataatgatga | |
| | aactattgatgttgtaatattgacaggggaaggaaaggcatttgtagctggagcagata | |
| | ttgcatacatgaaagatttagatgctgtagctgctaaagattttagtatcttaggagcaaa | |
| | agcttaggagaaatagaaaatagtaaaaaagtagtgatagctgctgtaaacggatttg | |
| | ctttaggtggaggatgtgaacttgcaatggcatgtgatataagaattgcatctgctaaag | |
| | ctaaatttggtcagccagaagtaactcttggaataactccaggatatggaggaactcaa | |
| | aggcttacaagattggttggaatggcaaaagcaaaagaattaatctttacaggtcaagt | |
| | tataaaagctgatgaagctgaaaaaatagggctagtaaatagagtcgttgagccagac | |
| | attttaatagaagaagttgagaaattagctaagataatagctaaaaatgctcagcttgca | |
| | gttagatactctaaagaagcaatacaacttggtgctcaaactgatataaatactggaata | |
| | gatatagaatctaatttatttggtctttgtttttcaactaaagaccaaaaagaaggaatgtc | |
| | agctttcgttgaaaagagagaagctaactttataaaagggtaataagaaggagatata | |
| | catatgagaagttttgaagaagtaattaagtttgcaaaagaaagaggacctaaaactat | |
| | atcagtagcatgttgccaagataaagaagttttaatggcagttgaaatggctagaaaag | |
| | aaaaaatagcaaatgccattttagtaggagatatagaaaagactaaagaaattgcaaa | |
| | aagcatagacatggatatcgaaaattatgaactgatagatataaaagatttagcagaag | |
| | catctctaaaatctgttgaattagtttcacaaggaaaagccgacatggtaatgaaaggc | |
| | ttagtagacacatcaataatactaaaagcagttttaaataaagaagtaggtcttagaact | |
| | ggaaatgtattaagtcacgtagcagtatttgatgtagagggatatgatagattatttttcgt | |
| | aactgacgcagctatgaacttagctcctgatacaaatactaaaaagcaaatcatagaa | |
| | aatgcttgcacagtagcacattcattagatataagtgaaccaaaagttgctgcaatatgc | |
| | gcaaaagaaaaagtaaatccaaaaatgaaagatacagttgaagctaaagaactagaa | |
| | gaaatgtatgaaagaggagaaatcaaaggttgtatggttggtgggccttttgcaattga | |
| | taatgcagtatctttagaagcagctaaacataaaggtataaatcatcctgtagcaggac | |
| | gagctgatatattattagccccagatattgaaggtggtaacatattatataaagctttggt | |
| | attcttctcaaaatcaaaaaatgcaggagttatagaggggctaaagcaccaataatatt | |
| | aacttctagagcagacagtgaagaaactaaactaaactcaatagctttaggtgttttaat | |
| | ggcagcaaaggcataataagaaggagatatacatatgagcaaaatatttaaaatctta | |
| | acaataaatcctggttcgacatcaactaaaatagctgtatttgataatgaggatttagtatt | |
| | tgaaaaaactttaagacattatcagaagaaataggaaaatatgagaaggtgtctgacc | |
| | aatttgaatttcgtaaacaagtaatagaagaagctctaaaagaaggtggagtaaaaac | |
| | atctgaattagatgctgtagtaggtagaggaggacttcttaaacctataaaaggtggta | |
| | cttattcagtaagtgctgctatgattgaagatttaaaagtgggagttttaggagaacacg | |
| | cttcaaacctaggtggaataatagcaaaacaaataggtgaagaagtaaatgttccttca | |
| | tacatagtagaccctgttgttgtagatgaattagaagatgttgctagaatttctggtatgc | |
| | ctgaaataagtagagcaagtgtagtacatgctttaaatcaaaaggcaatagcaagaag | |
| | atatgctagagaaataaacaagaaatatgaagatataaatcttatagttgcacacatgg | |
| | gtggaggagtttctgttggagctcataaaaatggtaaaatagtagatgttgcaaacgca | |
| | ttagatggagaaggacctttctctccagaaagaagtggtggactaccagtaggtgcat | |
| | tagtaaaaatgtgctttagtggaaaatatactcaagatgaaattaaaaagaaaataaaa | |
| | ggtaatggcggactagttgcatacttaaacactaatgatgctagagaagttgaagaaa | |
| | gaattgaagctggtgatgaaaaagctaaattagtatatgaagctatggcatatcaaatct | |
| | ctaaagaaataggagctagtgctgcagttcttaagggagatgtaaaagcaatattatta | |
| | actggtggaatcgcatattcaaaaatgtttacagaaatgattgcagatagagttaaattta | |
| | tagcagatgtaaaagtttatccaggtgaagatgaaatgattgcattagctcaaggtgga | |
| | cttagagttttaactggtgaagaagaggctcaagtttatgataactaataa | |
| Ydfz- ter- | CATTTCCTCTCATCCCATCCGGGGTGAGAGTCTTTT | SEQ ID |
| thiA1-hbd- | CCCCCGACTTATGGCTCATGCATGCATCAAAAAAG | NO: 178 |
| crt2-tesb | ATGTGAGCTTGATCAAAAACAAAAAATATTTCACTC | |
| butyrate | GACAGGAGTATTTATATTGCGCCCGGATCCCTCTAG | |
| cassette | AAATAATTTTGTTTAACTTTAAGAAGGAGATATACA | |
| | T | |
| | atgatcgtaaaacctatggtacgcaacaatatctgcctgaacgcccatcctcagggct | |
| | gcaagaagggagtggaagatcagattgaatataccaagaaacgcattaccgcagaa | |
| | gtcaaagctggcgcaaaagctccaaaaaacgttctggtgcttggctgctcaaatggtt | |
| | acggcctggcgagccgcattactgctgcgttcggatacggggctgcgaccatcggc | |
| | gtgtcctttgaaaaagcgggttcagaaaccaaatatggtacaccgggatggtacaata | |
| | atttggcatttgatgaagcggcaaaacgcgagggtctttatagcgtgacgatcgacgg | |
| | cgatgcgttttcagacgagatcaaggcccaggtaattgaggaagccaaaaaaaaag | |
| | gtatcaaatttgatctgatcgtatacagcttggccagcccagtacgtactgatcctgata | |
| | caggtatcatgcacaaaagcgttttgaaacccatttggaaaaacgttcacaggcaaaac | |
| | agtagatccgtttactggcgagctgaaggaaatctccgcggaaccagcaaatgacga | |
| | ggaagcagccgccactgttaaagttatggggggtgaagattgggaacgttggattaa | |
| | gcagctgtcgaaggaaggcctcttagaagaaggctgtattaccttggcctatagttata | |
| | ttggccctgaagctacccaagctttgtaccgtaaaggcacaatcggcaaggccaaag | |
| | aacacctggaggccacagcacaccgtctcaacaaagagaacccgtcaatccgtgcc | |
| | ttcgtgagcgtgaataaaggcctggtaacccgcgcaagcgccgtaatcccggtaatc | |
| | cctctgtatctcgccagcttgttcaaagtaatgaaagagaagggcaatcatgaaggttg | |
| | tattgaacagatcacgcgtctgtacgccgagcgcctgtaccgtaaagatggtacaatt | |
| | ccagttgatgaggaaaatcgcattcgcattgatgattgggagttagaagaagacgtcc | |
| | agaaagcggtatccgcgttgatggagaaagtcacgggtgaaaacgcagaatctctca | |
| | ctgacctagcggggtaccgccatgatttcttagctagtaacggctttgatgtagaaggta | |
| | ttaattatgaagcggaagttgaacgcttcgaccgtatctgataagaaggagatatacat | |
| | atgagagaagtagtaattgccagtgcagctagaacagcagtaggaagttttggagga | |
| | gcatttaaatcagtttcagcggtagagttaggggtaacagcagctaaagaagctataa | |
| | aaagagctaacataactccagatatgatagatgaatctcttttagggggagtacttaca | |
| | gcaggtcttggacaaaatatagcaagacaaatagcattaggagcaggaataccagta | |
| | gaaaaaccagctatgactataaatatagtttgtggttctggattaagatctgtttcaatgg | |
| | catctcaacttatagcattaggtgatgctgatataatgttagttggtggagctgaaaacat | |
| | gagtatgtctccttatttagtaccaagtgcgagatatggtgcaagaatgggtgatgctg | |
| | cttttgttgattcaatgataaaagatggattatcagacatatttaataactatcacatgggt | |
| | attactgctgaaaacatagcagagcaatggaatataactagagaagaacaagatgaat | |
| | tagctcttgcaagtcaaaataaagctgaaaaagctcaagctgaaggaaaatttgatga | |
| | agaaatagttcctgttgttataaaaggaagaaaaggtgacactgtagtagataaagatg | |
| | aatatattaagcctggcactacaatggagaaacttgctaagttaagacctgcatttaaaa | |
| | aagatggaacagttactgctggtaatgcatcaggaataaatgatggtgctgctatgtta | |
| | gtagtaatggctaaagaaaaagctgaagaactaggaatagagcctcttgcaactatag | |
| | tttcttatggaacagctggtgttgaccctaaaataatgggatatggaccagttccagcaa | |
| | ctaaaaaagctttagaagctgctaatatgactattgaagatatagatttagttgaagctaa | |
| | tgaggcatttgctgcccaatctgtagctgtaataagagacttaaatatagatatgaataa | |
| | agttaatgttaatggtggagcaatagctataggacatccaataggatgctcaggagca | |
| | agaatacttactacacttttatatgaaatgaagagaagagatgctaaaactggtcttgct | |
| | acactttgtataggcggtggaatgggaactactttaatagttaagagatagtaagaagg | |
| | agatatacatatgaaattagctgtaataggtagtggaactatgggaagtggtattgtaca | |
| | aacttttgcaagttgtggacatgatgtatgtttaaagagtagaactcaaggtgctatagat | |
| | aaatgtttagctttattagataaaaatttaactaagttagttactaagggaaaaatggatg | |
| | aagctacaaaagcagaaatattaagtcatgttagttcaactactaattatgaagatttaaa | |
| | agatatggatttaataatagaagcatctgtagaagacatgaatataaagaaagatgtttt | |
| | caagttactagatgaattatgtaaagaagatactatcttggcaacaaatacttcatcatta | |
| | tctataacagaaatagcttcttctactaagcgcccagataaagttataggaatgcatttct | |
| | ttaatccagttcctatgatgaaattagttgaagttataagtggtcagttaacatcaaaagtt | |
| | acttttgatacagtatttgaattatctaagagtatcaataaagtaccagtagatgtatctga | |
| | atctcctggatttgtagtaaatagaatacttatacctatgataaatgaagctgttggtatat | |
| | atgcagatggtgttgcaagtaaagaagaaatagatgaagctatgaaattaggagcaa | |
| | accatccaatgggaccactagcattaggtgatttaatcggattagatgttgttttagctat | |
| | aatgaacgttttatatactgaatttggagatactaaatatagacctcatccacttttagcta | |
| | aaatggttagagctaatcaattaggaagaaaaactaagataggattctatgattataata | |
| | aataataagaaggagatatacatatgagtacaagtgatgttaaagtttatgagaatgtag | |
| | ctgttgaagtagatggaaatatatgtacagtgaaaatgaatagacctaaagcccttaat | |
| | gcaataaattcaaagactttagaagaactttatgaagtatttgtagatattaataatgatga | |
| | aactattgatgttgtaatattgacaggggaaggaaaggcatttgtagctggagcagata | |
| | ttgcatacatgaaagatttagatgctgtagctgctaaagattttagtatcttaggagcaaa | |
| | agcttttggagaaatagaaaatagtaaaaaagtagtgatagctgctgtaaacggatttg | |
| | ctttaggtggaggatgtgaacttgcaatggcatgtgatataagaattgcatctgctaaag | |
| | ctaaatttggtcagccagaagtaactcttggaataactccaggatatggaggaactcaa | |
| | aggcttacaagattggttggaatggcaaaagcaaaagaattaatctttacaggtcaagt | |
| | tataaaagctgatgaagctgaaaaaatagggctagtaaatagagtcgttgagccagac | |
| | attttaatagaagaagttgagaaattagctaagataatagctaaaaatgctcagcttgca | |
| | gttagatactctaaagaagcaatacaacttggtgctcaaactgatataaatactggaata | |
| | gatatagaatctaatttatttggtctttgtttttcaactaaagaccaaaaagaaggaatgtc | |
| | agctttcgttgaaaagagagaagctaactttataaaagggtaataagaaggagatata | |
| | catatgAGTCAGGCGCTAAAAAATTTACTGACATTGTT | |
| | AAATCTGGAAAAAATTGAGGAAGGACTCTTTCGCG | |
| | GCCAGAGTGAAGATTTAGGTTTACGCCAGGTGTTTG | |
| | GCGGCCAGGTCGTGGGTCAGGCCTTGTATGCTGCA | |
| | AAAGAGACCGTCCCTGAAGAGCGGCTGGTACATTC | |
| | GTTTCACAGCTACTTTCTTCGCCCTGGCGATAGTAA | |
| | GAAGCCGATTATTTATGATGTCGAAACGCTGCGTGA | |
| | CGGTAACAGCTTCAGCGCCCGCCGGGTTGCTGCTAT | |
| | TCAAAACGGCAAACCGATTTTTTATATGACTGCCTC | |
| | TTTCCAGGCACCAGAAGCGGGTTTCGAACATCAAA | |
| | AAACAATGCCGTCCGCGCCAGCGCCTGATGGCCTC | |
| | CCTTCGGAAACGCAAATCGCCCAATCGCTGGCGCA | |
| | CCTGCTGCCGCCAGTGCTGAAAGATAAATTCATCTG | |
| | CGATCGTCCGCTGGAAGTCCGTCCGGTGGAGTTTCA | |
| | TAACCCACTGAAAGGTCACGTCGCAGAACCACATC | |
| | GTCAGGTGTGGATCCGCGCAAATGGTAGCGTGCCG | |
| | GATGACCTGCGCGTTCATCAGTATCTGCTCGGTTAC | |
| | GCTTCTGATCTTAACTTCCTGCCGGTAGCTCTACAG | |
| | CCGCACGGCATCGGTTTTCTCGAACCGGGGATTCAG | |
| | ATTGCCACCATTGACCATTCCATGTGGTTCCATCGC | |
| | CCGTTTAATTTGAATGAATGGCTGCTGTATAGCGTG | |
| | GAGAGCACCTCGGCGTCCAGCGCACGTGGCTTTGT | |
| | GCGCGGTGAGTTTTATACCCAAGACGGCGTACTGGT | |
| | TGCCTCGACCGTTCAGGAAGGGGTGATGCGTAATC | |
| | ACAATtaa | |

### Example 11. Production of Butyrate in Recombinant E. coli

[1311] The effect of oxygen and glucose on butyrate production was assessed in E. coli Nissle strains using a butyrate cassette driven by a FNR promoter (ter-thiA1-hbd-crt2-pbt-buk genes under the control of a ydfZ promoter).

[1312] All incubations were performed at 37° C. Cultures of E. coli strains DH5a and Nissle transformed with the butyrate cassettes were grown overnight in LB and then diluted 1:200 into 4 mL of LB containing no glucose or RCM medium containing 0.5% glucose. The cells were grown with shaking (250 rpm) for 4-6 h and incubated aerobically or anaerobically in a Coy anaerobic chamber (supplying 90% N₂, 5% CO₂, 5% H2). One mL culture aliquots were prepared in 1.5 mL capped tubes and incubated in a stationary incubator to limit culture aeration. One tube was removed at each time point (0, 1, 2, 4, and 20 hours) and analyzed for butyrate concentration by LC-MS to confirm that butyrate production in these recombinant strains can be achieved in a low-oxygen environment.

[1313] FIG. 14C depicts butyrate production in strains comprising an FNR-butyrate cassette (having the ter substitution) in the presence/absence of glucose and oxygen and shows that bacteria need both glucose and anaerobic conditions for butyrate production from the FNR promoter. Cells were grown aerobically or anaerobically in media containing no glucose (LB) or in media containing glucose at 0.5% (RMC). Culture samples were taken at indicated time pints and supernatant fractions were assessed for butyrate concentration using LC-MS. These data show that SYN501 requires glucose for butyrate production and that in the presence of glucose butyrate production can be enhanced under anaerobic conditions when under the control of the anaerobic FNR-regulated ydfZ promoter.

### Example 12. Optimization of a Low-Dose DSS-Induced Colitis Model for the Detection of Compromised Barrier Function

[1314] To Determine the optimal DDS concentration to administer to mice to be able to investigate compromised barrier function, as study was conducted in mice using various concentrations of DSS.

[1315] Briefly, C57BL6 mice (12 weeks, N=25) were treated with 0.25%, 0.5%, 1% and 1.5% DSS and FITC-dextran (4 kD).

[1316] On day 0 of the study, animals were weighed, and randomized mice into 5 treatment groups (n=5/group) according to weight as follows: Group 1-H2O Control, n=5; Group 2-0.25% DSS n=5; Group 3-0.5% DSS, n=5; Group 4-1% DSS, n=5; Group 5-1.5% DSS, n=5. Fecal pellets were collected and water was changed to DSS-containing water. Animals were again weighed on day one and three. On day two, blood samples were collected for spectrophotometric analysis of FITC. On day four, mice were fasted for 4 h and gavaged all mice with 0.6 mg/g FITC-dextran (4 kD). At 3 h post FITC-dex administration, animals were weighed and bled. Fecal pellets were collected and colon samples were harvested. Blood samples were processed for spectrophotometric analysis of FITC, and serum was prepared from whole blood.

[1317] Fecal pellets are analyzed for levels of mouse lipocalin2 and calprotectin by ELISA (RnD systems), as seen in FIG. 14D. CRP levels are also analyzed by ELSA (R&D Systems). Colon tissue is analyzed for increased levels of IL-1a/b, -6, -13, -18, CCL1, CXCL1, TNFα, IFNg EpCAM, MPO and G-CSF by qPCR. Serum was analyzed for FITC-dextran levels by spectrophotometry, and results are shown in FIG. 15. As seen in FIG. 15, 0.5% DSS is the lowest dose at which an increase in FITC dextran was observed.

### Example 13. Comparison of Low-Dose DSS Concentrations and Different FITC MW for the Detection of Compromised Barrier Function

[1318] A study was conducted to determine the optimal DSS concentration (0.75 or 1.5%) and molecular weight FITC-Dextran (4 or 40 kDA) to administer to mice to be able to investigate compromised barrier function.

[1319] C57BL6 (9 weeks, n=18), were treated with DSS as follows DSS-0.75 and 1.5%; FITC-dextran (4 and 40 kD) and effects on molecular markers of colitis (as assessed by Spectrophotometry and ELISA) assessed, and body weight and overall animal health were monitored.

[1320] On day 0, mice were weighed and randomized mice into 3 treatment groups (n=6/group) according to weight as follows: Group 1—H2O Control, n=6; Group 2—0.75% DSS, n=6; Group 3—1.5% DSS, n=6. Water was changed to DSS-containing water.

[1321] Mice were again weighed on days 1-3. ON day 4, mice were fasted for 4 hours, and 3 mice from each group were gavaged with 0.6 mg/g of either 4 kDa or 40 kDa FITC-dextran. Mice 1-3 and 4-6 (as designated by tail marks) from each group were used for 4 kDa and 40 kDa FITC-dex administration respectively. At 3 h post FITC-dex administration, mice were weighed and bled, and fecal pellets were collected. Blood samples were processed for spectrophotometric analysis of FITC, and serum from whole blood was prepared.

[1322] Analysis of serum for FITC-dextran levels by spectrophotometry is shown in FIG. 15.

### Example 14. Butyrate-Producing Bacterial Strain Reduces Gut Inflammation in a Low-Dose DSS-Induced Mouse Model of IBD

[1323] At Day 0, 40 C57BL6 mice (8 weeks of age) were weighed and randomized into the following five treatment groups (n=8 per group): H₂O control (group 1); 0.5% DSS control (group 2); 0.5% DSS+100 mM butyrate (group 3); 0.5% DSS+SYN94 (group 4); and 0.5% DSS+SYN363 (group 5). After randomization, the cage water for group 3 was changed to water supplemented with butyrate (100 mM), and groups 4 and 5 were administered 100 μL of SYN94 and SYN363 by oral gavage, respectively. At Day 1, groups 4 and 5 were gavaged with bacteria in the morning, weighed, and gavaged again in the evening. Groups 4 and 5 were also gavaged once per day for Day 2 and Day 3.

[1324] At Day 4, groups 4 and 5 were gavaged with bacteria, and then all mice were weighed. Cage water was changed to either H₂O+0.5% DSS (groups 2, 4, and 5), or H₂O+0.5% DSS supplemented with 100 mM butyrate (group 3). Mice from groups 4 and 5 were gavaged again in the evening. On Days 5-7, groups 4 and 5 were gavaged with bacteria in the morning, weighed, and gavaged again in the evening.

[1325] At Day 8, all mice were fasted for 4 hours, and groups 4 and 5 were gavaged with bacteria immediately following the removal of food. All mice were then weighed, and gavaged with a single dose of FITC-dextran tracer (4 kDa, 0.6 mg/g body weight). Fecal pellets were collected; however, if colitis was severe enough to prevent feces collection, feces were harvested after euthanization. All mice were euthanized at exactly 3 hours following FITC-dextran administration. Animals were then cardiac bled and blood samples were processed to obtain serum. Levels of mouse lipocalin 2, calprotectin, and CRP-1 were quantified by ELISA, and serum levels of FITC-dextran were analyzed by spectrophotometry (see also Example 8).

[1326] FIG. 14D shows lipocalin 2 (LCN2) levels in all treatment groups, as demonstrated by ELISA, on Day 8 of the study. Since LCN2 is a biomarker of inflammatory disease activity, these data suggest that SYN-501 produces enough butyrate to significantly reduce LCN2 concentrations, as well as gut inflammation, in a low-dose DSS-induced mouse model of IBD.

### Example 15. Comparison of In Vitro Butyrate Production Efficacy of Chromosomal Insertion and Plasmid-Bearing Engineered Bacterial Strains

[1327] The in vitro butyrate production efficacy of engineered bacterial strains harboring a chromosomal insertion of a butyrate cassette was compared to a strain bearing a butyrate cassette on a plasmid. SYN1001 and SYN1002 harbor a chromosomal insertion between the agaI/rsmI locus of a butyrate cassette (either ter→tesB or ter→pbt-buk, respectively) driven by an fnr inducible promoter. These strains were compared side by side with the low copy plasmid strain SYN501 (Logic156 (pSC101 PydfZ-ter->pbt-buk butyrate plasmid) also driven by an fnr inducible promoter. Butyrate levels in the media were measured at 4 and 24 hours post anaerobic induction.

[1328] Briefly, 3 ml LB was inoculated with bacteria from frozen glycerol stocks. Bacteria were grown overnight at 37 C with shaking. Overnight cultures were diluted 1:100 dilution into 10 ml LB (containing antibiotics) in a 125 ml baffled flask. Cultures were grown aerobically at 37 C with shaking for about 1.5 h, and then transferred to the anaerobic chamber at 37 C for 4 h. Bacteria (2×10⁸ CFU) were added to 1 ml M9 media containing 50 mM MOPS with 0.5% glucose in microcentrifuge tubes. Cells were plated to determine cell counts. The assay tubes were placed in the anaerobic chamber at 37 C. At indicated times (4 and 24 h), 120 ul cells were removed and pelleted at 14,000 rpm for Imin, and 100 ul of the supernatant was transferred to a 96-well assay plate and sealed with aluminum foil, and stored at −80 C until analysis by LC-MS for butyrate concentrations (as described in Example 22). Results are depicted in FIG. 19A, and show that SYN1001 and SYN1002 give comparable butyrate production to the plasmid strain SYN501.

[1329] In some embodiments, genetically engineered bacteria comprise a nucleic acid sequence that is at least about 80%, at least about 85%, at least about 90%, at least about 95%, or at least about 99% homologous to the DNA sequence of SEQ ID NO: 179, 180, 181, or 182, or a functional fragment thereof.

TABLE 48
FRNRs Butyrate Cassette Sequences

| Description | Sequence |
|---|---|
| Pfnrs-ter-thiA1-hbd-ctr2- | GGTACCAGTTGTTCTTATTGGTGGTGTTGCTTTATGGTT |
| tesB | GCATCGTAGTAAATGGTTGTAACAAAAGCAATTTTTCC |
| SEQ ID NO:179, e.g. | GGCTGTCTGTATACAAAAACGCCGCAAAGTTTGAGCGA |
| integrated into the | AGTCAATAAACTCTCTACCCATTCAGGGCAATATCTCTC |
| chromosome in SYN1001 | TTGGATCCAAAGTGAACTCTAGAAATAATTTTGTTTAAC |
| Pfnrs: uppercase; butyrate | TTTAAGAAGGAGATATACATatgatcgtaaaacctatggtacgcaacaat |
| cassette: lower case | atctgcctgaacgcccatcctcagggctgcaagaagggagtggaagatcagattgaatata |
| | ccaagaaacgcattaccgcagaagtcaaagctggcgcaaaagctccaaaaaacgttctggt |
| | gcttggctgctcaaatggttacggcctggcgagccgcattactgctgcgttcggatacgggg |
| | ctgcgaccatcggcgtgtcctttgaaaaagcgggttcagaaaccaaatatggtacaccggg |
| | atggtacaataatttggcatttgatgaagcggcaaaacgcgagggtctttatagcgtgacgat |
| | cgacggcgatgcgttttcagacgagatcaaggcccaggtaattgaggaagccaaaaaaaa |
| | aggtatcaaatttgatctgatcgtatacagcttggccagcccagtacgtactgatcctgataca |
| | ggtatcatgcacaaaagcgttttgaaaccctttggaaaaacgttcacaggcaaaacagtagat |
| | ccgtttactggcgagctgaaggaaatctccgcggaaccagcaaatgacgaggaagcagcc |
| | gccactgttaaagttatggggggtgaagattgggaacgttggattaagcagctgtcgaagga |
| | aggcctcttagaagaaggctgtattaccttggcctatagttatattggccctgaagctacccaa |
| | gctttgtaccgtaaaggcacaatcggcaaggccaaagaacacctggaggccacagcacac |
| | cgtctcaacaaagagaacccgtcaatccgtgccttcgtgagcgtgaataaaggcctggtaac |
| | ccgcgcaagcgccgtaatcccggtaatccctctgtatctcgccagcttgttcaaagtaatgaa |
| | agagaagggcaatcatgaaggttgtattgaacagatcacgcgtctgtacgccgagcgcctgt |
| | accgtaaagatggtacaattccagttgatgaggaaaatcgcattcgcattgatgattgggagtt |
| | agaagaagacgtccagaaagcggtatccgcgttgatggagaaagtcacgggtgaaaacgc |
| | agaatctctcactgacttagcggggtaccgccatgatttcttagctagtaacggctttgatgtag |
| | aaggtattaattatgaagcggaagttgaacgcttcgaccgtatctgataagaaggagatatac |
| | atatgagagaagtagtaattgccagtgcagctagaacagcagtaggaagttttggaggagc |
| | atttaaatcagtttcagcggtagagttaggggtaacagcagctaaagaagctataaaaagag |
| | ctaacataactccagatatgatagatgaatctcttttagggggagtacttacagcaggtcttgg |
| | acaaaatatagcaagacaaatagcattaggagcaggaataccagtagaaaaaccagctatg |
| | actataaatatagtttgtggttctggattaagatctgtttcaatggcatctcaacttatagcattag |
| | gtgatgctgatataatgttagttggtggagctgaaaacatgagtatgtctccttatttagtaccaa |
| | gtgcgagatatggtgcaagaatgggtgatgctgcttttgttgattcaatgataaaagatggatt |
| | atcagacatatttaataactatcacatgggtattactgctgaaaacatagcagagcaatggaat |
| | ataactagagaagaacaagatgaattagctcttgcaagtcaaaataaagctgaaaaagctca |
| | agctgaaggaaaatttgatgaagaaatagttcctgttgttataaaaggaagaaaaggtgacac |
| | tgtagtagataaagatgaatatattaagcctggcactacaatggagaaacttgctaagttaaga |
| | cctgcatttaaaaaagatggaacagttactgctggtaatgcatcaggaataaatgatggtgct |
| | gctatgttagtagtaatggctaaagaaaaagctgaagaactaggaatagagcctcttgcaact |
| | atagtttcttatggaacagctggtgttgaccctaaaataatgggatatggaccagttccagcaa |
| | ctaaaaaagctttagaagctgctaatatgactattgaagatatagatttagttgaagctaatgag |
| | gcatttgctgcccaatctgtagctgtaataagagacttaaatatagatatgaataaagttaatgtt |
| | aatggtggagcaatagctataggacatccaataggatgctcaggagcaagaatacttactac |
| | acttttatatgaaatgaagagaagagatgctaaaactggtcttgctacactttgtataggcggtg |
| | gaatgggaactactttaatagttaagagatagtaagaaggagatatacatatgaaattagctgt |
| | aataggtagtggaactatgggaagtggtattgtacaaacttttgcaagttgtggacatgatgtat |
| | gtttaaagagtagaactcaaggtgctatagataaatgtttagctttattagataaaaatttaacta |
| | agttagttactaagggaaaaatggatgaagctacaaaagcagaaatattaagtcatgttagttc |
| | aactactaattatgaagatttaaaagatatggatttaataatagaagcatctgtagaagacatga |
| | atataaagaaagatgttttcaagttactagatgaattatgtaaagaagatactatcttggcaaca |
| | aatacttcatcattatctataacagaaatagcttcttctactaagcgcccagataaagttatagga |
| | atgcatttctttaatccagttcctatgatgaaattagttgaagttataagtggtcagttaacatcaa |
| | aagttacttttgatacagtatttgaattatctaagagtatcaataaagtaccagtagatgtatctga |
| | atctcctggatttgtagtaaatagaatacttatacctatgataaatgaagctgttggtatatatgca |
| | gatggtgttgcaagtaaagaagaaatagatgaagctatgaaattaggagcaaaccatccaat |
| | gggaccactagcattaggtgatttaatcggattagatgttgttttagctataatgaacgttttatat |
| | actgaatttggagatactaaatatagacctcatccacttttagctaaaatggttagagctaatca |
| | attaggaagaaaaactaagataggattctatgattataataaataataagaaggagatatacat |
| | atgagtacaagtgatgttaaagtttatgagaatgtagctgttgaagtagatggaaatatatgtac |
| | agtgaaaatgaatagacctaaagcccttaatgcaataaattcaaagactttagaagaactttat |
| | gaagtatttgtagatattaataatgatgaaactattgatgttgtaatattgacaggggaaggaaa |
| | ggcatttgtagctggagcagatattgcatacatgaaagatttagatgctgtagctgctaaagat |
| | tttagtatcttaggagcaaaagcttttggagaaatagaaaatagtaaaaaagtagtgatagctg |
| | ctgtaaacggatttgctttaggtggaggatgtgaacttgcaatggcatgtgatataagaattgc |
| | atctgctaaagctaaatttggtcagccagaagtaactcttggaataactccaggatatggagg |
| | aactcaaaggcttacaagattggttggaatggcaaaagcaaaagaattaatctttacaggtca |
| | agttataaaagctgatgaagctgaaaaaatagggctagtaaatagagtcgttgagccagaca |
| | ttttaatagaagaagttgagaaattagctaagataatagctaaaaatgctcagcttgcagttaga |
| | tactctaaagaagcaatacaacttggtgctcaaactgatataaatactggaatagatatagaat |
| | ctaatttatttggtctttgtttttcaactaaagaccaaaaagaaggaatgtcagctttcgttgaaaa |
| | gagagaagctaactttataaaagggtaataagaaggagatatacatatgagtcaggcgctaa |
| | aaaatttactgacattgttaaatctggaaaaaattgaggaaggactctttcgcggccagagtga |
| | agatttaggtttacgccaggtgtttggcggccaggtcgtgggtcaggccttgtatgctgcaaa |
| | agagaccgtccctgaagagcggctggtacattcgtttcacagctactttcttcgccctggcga |
| | tagtaagaagccgattatttatgatgtcgaaacgctgcgtgacggtaacagcttcagcgcccg |
| | ccgggttgctgctattcaaaacggcaaaccgattttttatatgactgcctctttccaggcaccag |
| | aagcgggtttcgaacatcaaaaaacaatgccgtccgcgccagcgcctgatggcctcccttc |
| | ggaaacgcaaatcgcccaatcgctggcgcacctgctgccgccagtgctgaaagataaattc |
| | atctgcgatcgtccgctggaagtccgtccggtggagtttcataacccactgaaaggtcacgtc |
| | gcagaaccacatcgtcaggtgtggatccgcgcaaatggtagcgtgccggatgacctgcgc |
| | gttcatcagtatctgctcggttacgcttctgatcttaacttcctgccggtagctctacagccgca |
| | cggcatcggttttctcgaaccggggattcagattgccaccattgaccattccatgtggttccat |
| | cgcccgtttaatttgaatgaatggctgctgtatagcgtggagagcacctcggcgtccagcgc |
| | acgtggctttgtgcgcggtgagttttatacccaagacggcgtactggttgcctcgaccgttca |
| | ggaaggggtgatgcgtaatcacaattaa |
| Pfnrs-ter-thiA1-hbd-crt2- | GGTACCAGTTGTTCTTATTGGTGGTGTTGCTTTATGGTT |
| pbt-buk | GCATCGTAGTAAATGGTTGTAACAAAAGCAATTTTTCC |
| (SEQ ID NO: 180), e.g. | GGCTGTCTGTATACAAAAACGCCGCAAAGTTTGAGCGA |
| integrated into the | AGTCAATAAACTCTCTACCCATTCAGGGCAATATCTCTC |
| chromosome in SYN1002 | TTGGATCCAAAGTGAACTCTAGAAATAATTTTGTTTAAC |
| Pfnrs: uppercase; butyrate | TTTAAGAAGGAGATATACATatgatcgtaaaacctatggtacgcaacaat |
| cassette: lower case | atctgcctgaacgcccatcctcagggctgcaagaagggagtggaagatcagattgaatata |
| | ccaagaaacgcattaccgcagaagtcaaagctggcgcaaaagctccaaaaaacgttctggt |
| | gcttggctgctcaaatggttacggcctggcgagccgcattactgctgcgttcggatacgggg |
| | ctgcgaccatcggcgtgtcctttgaaaaagcgggttcagaaaccaaatatggtacaccggg |
| | atggtacaataatttggcatttgatgaagcggcaaaacgcgagggtctttatagcgtgacgat |
| | cgacggcgatgcgttttcagacgagatcaaggcccaggtaattgaggaagccaaaaaaaa |
| | aggtatcaaatttgatctgatcgtatacagcttggccagcccagtacgtactgatcctgataca |
| | ggtatcatgcacaaaagcgttttgaaaccctttggaaaaacgttcacaggcaaaacagtagat |
| | ccgtttactggcgagctgaaggaaatctccgcggaaccagcaaatgacgaggaagcagcc |
| | gccactgttaaagttatggggggtgaagattgggaacgttggattaagcagctgtcgaagga |
| | aggcctcttagaagaaggctgtattaccttggcctatagttatattggccctgaagctacccaa |
| | gctttgtaccgtaaaggcacaatcggcaaggccaaagaacacctggaggccacagcacac |
| | cgtctcaacaaagagaacccgtcaatccgtgccttcgtgagcgtgaataaaggcctggtaac |
| | ccgcgcaagcgccgtaatcccggtaatccctctgtatctcgccagcttgttcaaagtaatgaa |
| | agagaagggcaatcatgaaggngtattgaacagatcacgcgtctgtacgccgagcgcctgt |
| | accgtaaagatggtacaattccagttgatgaggaaaatcgcattcgcattgatgattgggagtt |
| | agaagaagacgtccagaaagcggtatccgcgttgatggagaaagtcacgggtgaaaacgc |
| | agaatctctcactgacttagcggggtaccgccatgatttcttagctagtaacggattgatgtag |
| | aaggtattaattatgaagcggaagttgaacgcttcgaccgtatctgataagaaggagatatac |
| | atatgagagaagtagtaattgccagtgcagctagaacagcagtaggaagttttggaggagc |
| | atttaaatcagtttcagcggtagagttaggggtaacagcagctaaagaagctataaaaagag |
| | ctaacataactccagatatgatagatgaatctcttttagggggagtacttacagcaggtcttgg |
| | acaaaatatagcaagacaaatagcattaggagcaggaataccagtagaaaaaccagctatg |
| | actataaatatagtttgtggttctggattaagatctgtttcaatggcatctcaacttatagcattag |
| | gtgatgctgatataatgttagttggtggagctgaaaacatgagtatgtctccttatttagtaccaa |
| | gtgcgagatatggtgcaagaatgggtgatgctgcttttgttgattcaatgataaaagatggatt |
| | atcagacatatttaataactatcacatgggtattactgctgaaaacatagcagagcaatggaat |
| | ataactagagaagaacaagatgaattagctcttgcaagtcaaaataaagctgaaaaagctca |
| | agctgaaggaaaatttgatgaagaaatagttcctgttgttataaaaggaagaaaaggtgacac |
| | tgtagtagataaagatgaatatattaagcctggcactacaatggagaaacttgctaagttaaga |
| | cctgcatttaaaaaagatggaacagttactgctggtaatgcatcaggaataaatgatggtgct |
| | gctatgttagtagtaatggctaaagaaaaagctgaagaactaggaatagagcctcttgcaact |
| | atagtttcttatggaacagctggtgttgaccctaaaataatgggatatggaccagttccagcaa |
| | ctaaaaaagctttagaagctgctaatatgactattgaagatatagatttagttgaagctaatgag |
| | gcatttgctgcccaatctgtagctgtaataagagacttaaatatagatatgaataaagttaatgtt |
| | aatggtggagcaatagctataggacatccaataggatgctcaggagcaagaatacttactac |
| | acttttatatgaaatgaagagaagagatgctaaaactggtcttgctacactttgtataggcggtg |
| | gaatgggaactactttaatagttaagagatagtaagaaggagatatacatatgaaattagctgt |
| | aataggtagtggaactatgggaagtggtattgtacaaacttttgcaagttgtggacatgatgtat |
| | gtttaaagagtagaactcaaggtgctatagataaatgtttagctttattagataaaaatttaacta |
| | agttagttactaagggaaaaatggatgaagctacaaaagcagaaatattaagtcatgttagttc |
| | aactactaattatgaagatttaaaagatatggatttaataatagaagcatctgtagaagacatga |
| | atataaagaaagatgttttcaagttactagatgaattatgtaaagaagatactatcttggcaaca |
| | aatacttcatcattatctataacagaaatagcttcttctactaagcgcccagataaagttatagga |
| | atgcatttctttaatccagttcctatgatgaaattagttgaagttataagtggtcagttaacatcaa |
| | aagttacttttgatacagtatttgaattatctaagagtatcaataaagtaccagtagatgtatctga |
| | atctcctggatttgtagtaaatagaatacttatacctatgataaatgaagctgttggtatatatgca |
| | gatggtgttgcaagtaaagaagaaatagatgaagctatgaaattaggagcaaaccatccaat |
| | gggaccactagcattaggtgatttaatcggattagatgttgttttagctataatgaacgttttatat |
| | actgaatttggagatactaaatatagacctcatccacttttagctaaaatggttagagctaatca |
| | attaggaagaaaaactaagataggattctatgattataataaataataagaaggagatatacat |
| | atgagtacaagtgatgttaaagtttatgagaatgtagctgttgaagtagatggaaatatatgtac |
| | agtgaaaatgaatagacctaaagcccttaatgcaataaattcaaagactttagaagaactttat |
| | gaagtatttgtagatattaataatgatgaaactattgatgttgtaatattgacaggggaaggaaa |
| | ggcatttgtagctggagcagatattgcatacatgaaagatttagatgctgtagctgctaaagat |
| | tttagtatcttaggagcaaaagcttttggagaaatagaaaatagtaaaaaagtagtgatagctg |
| | ctgtaaacggatttgctttaggtggaggatgtgaacttgcaatggcatgtgatataagaattgc |
| | atctgctaaagctaaatttggtcagccagaagtaactcttggaataactccaggatatggagg |
| | aactcaaaggcttacaagattggttggaatggcaaaagcaaaagaattaatctttacaggtca |
| | agttataaaagctgatgaagctgaaaaaatagggctagtaaatagagtcgttgagccagaca |
| | ttttaatagaagaagttgagaaattagctaagataatagctaaaaatgctcagcttgcagttaga |
| | tactctaaagaagcaatacaacttggtgctcaaactgatataaatactggaatagatatagaat |
| | ctaatttatttggtctttgtttttcaactaaagaccaaaaagaaggaatgtcagctttcgttgaaaa |
| | gagagaagctaactttataaaagggtaataagaaggagatatacatatgagaagttttgaaga |
| | agtaattaagtttgcaaaagaaagaggacctaaaactatatcagtagcatgttgccaagataa |
| | agaagttttaatggcagttgaaatggctagaaaagaaaaaatagcaaatgccattttagtagg |
| | agatatagaaaagactaaagaaattgcaaaaagcatagacatggatatcgaaaattatgaact |
| | gatagatataaaagatttagcagaagcatctctaaaatctgttgaattagtttcacaaggaaaa |
| | gccgacatggtaatgaaaggcttagtagacacatcaataatactaaaagcagttttaaataaa |
| | gaagtaggtcttagaactggaaatgtattaagtcacgtagcagtatttgatgtagagggatatg |
| | atagattatttttcgtaactgacgcagctatgaacttagctcctgatacaaatactaaaaagcaa |
| | atcatagaaaatgcttgcacagtagcacattcattagatataagtgaaccaaaagttgctgcaa |
| | tatgcgcaaaagaaaaagtaaatccaaaaatgaaagatacagttgaagctaaagaactaga |
| | agaaatgtatgaaagaggagaaatcaaaggttgtatggttggtgggccttttgcaattgataat |
| | gcagtatctttagaagcagctaaacataaaggtataaatcatcctgtagcaggacgagctgat |
| | atattattagccccagatattgaaggtggtaacatattatataaagctttggtattcttctcaaaat |
| | caaaaaatgcaggagttatagttggggctaaagcaccaataatattaacttctagagcagaca |
| | gtgaagaaactaaactaaactcaatagctttaggtgttttaatggcagcaaaggcataataag |
| | aaggagatatacatatgagcaaaatatttaaaatcttaacaataaatcctggttcgacatcaact |
| | aaaatagctgtatttgataatgaggatttagtatttgaaaaaactttaagacattcttcagaagaa |
| | ataggaaaatatgagaaggtgtctgaccaatttgaatttcgtaaacaagtaatagaagaagct |
| | ctaaaagaaggtggagtaaaaacatctgaattagatgctgtagtaggtagaggaggacttctt |
| | aaacctataaaaggtggtacttattcagtaagtgctgctatgattgaagatttaaaagtgggagt |
| | tttaggagaacacgcttcaaacctaggtggaataatagcaaaacaaataggtgaagaagtaa |
| | atgttccttcatacatagtagaccctgttgttgtagatgaattagaagatgttgctagaatttctgg |
| | tatgcctgaaataagtagagcaagtgtagtacatgctttaaatcaaaaggcaatagcaagaag |
| | atatgctagagaaataaacaagaaatatgaagatataaatcttatagttgcacacatgggtgg |
| | aggagtttctgttggagctcataaaaatggtaaaatagtagatgttgcaaacgcattagatgga |
| | gaaggacctttctctccagaaagaagtggtggactaccagtaggtgcattagtaaaaatgtgc |
| | tttagtggaaaatatactcaagatgaaattaaaaagaaaataaaaggtaatggcggactagtt |
| | gcatacttaaacactaatgatgctagagaagttgaagaaagaattgaagctggtgatgaaaa |
| | agctaaattagtatatgaagctatggcatatcaaatctctaaagaaataggagctagtgctgca |
| | gttcttaagggagatgtaaaagcaatattattaactggtggaatcgcatattcaaaaatgtttac |
| | agaaatgattgcagatagagttaaatttatagcagatgtaaaagtttatccaggtgaagatgaa |
| | atgattgcattagctcaaggtggacttagagttttaactggtgaagaagaggctcaagtttatg |
| | ataactaa |
| PfNRS (ribosome binding | GGTACCAGTTGTTCTTATTGGTGGTGTTGCTTTATGGTT |
| site is underlined) | GCATCGTAGTAAATGGTTGTAACAAAAGCAATTTTTCC |
| (SEQ ID NO: 181) | GGCTGTCTGTATACAAAAACGCCGCAAAGTTTGAGCGA |
| | AGTCAATAAACTCTCTACCCATTCAGGGCAATATCTCTC |
| | TTGGATCCAAAGTGAACTCTAGAAATAATTTTGTTTAAC |
| | TTTAAGAAGGAGATATACAT |
| Ribosome binding site and | CTCTAGAAATAATTTTGTTTAACTTTAAGAAGGAGATAT |
| leader region (SEQ ID | ACAT |
| NO:182) | |

### Example 16. Assessment of Intestinal Butyrate Levels in Response to SYN501 Administration in Mice

[1330] To determine efficacy of butyrate production by the genetically engineered bacteria in vivo, the levels of butyrate upon administration of SYN501 (Logic156 (pSC101 PydfZ-ter->pbt-buk butyrate plasmid)) to C57BL6 mice was first assessed in the feces. Water containing 100 mM butyrate was used as a control.

[1331] On day 1, C57BL6 mice (24 total animals) were weighed and randomized into 4 groups; Group 1: H20 control (n=6); Group 2-100 mM butyrate (n=6); Group 3-streptomycin resistant Nissle (n=6); Group 4-SYN501 (n=6). Mice were either gavaged with 100 ul streptomycin resistant Nissle or SYN501, and group 2 was changed to H20(+)100 mM butyrate at a dose of 10e10 cells/100 ul. On days 2-4, mice were weighted and Groups 3 and 4 were gavaged in the AM and the PM with streptomycin resistant Nissle or SYN501. On day 5, mice were weighed and Groups 3 and 4 were gavaged in the am with streptomycin resistant Nissle or SYN501, and feces was collected and butyrate concentrations determined as described in Example 23. Results are depicted in FIG. 28. Significantly greater levels of butyrate were detected in the feces of the mice gavaged with SYN501 as compared mice gavaged with the Nissle control or those given water only. Levels are close to 2 mM and higher than the levels seen in the mice fed with H20 (+) 200 mM butyrate.

[1332] Next the effects of SYN501 on levels of butyrate in the cecum, cecal effluent, large intestine, and large intestine effluent are assessed. Because baseline concentrations of butyrate are high in these compartments, an antibiotic treatment is administered in advance to clear out the bacteria responsible for butyrate production in the intestine. As a result, smaller differences in butyrate levels can be more accurately observed and measured. Water containing 100 mM butyrate is used as a control.

[1333] During week 1 of the study, animals are treated with an antibiotic cocktail in the drinking water to reduce the baseline levels of resident microflora. The antibiotic cocktail is composed of ABX-ampicillin, vancomycin, neomycin, and metronidazole. During week 2 animals are orally administered 100 ul of streptomycin resistant Nissle or engineered strain SYN501 twice a day for five days (at a dose of 10e10 cells/100 ul).

[1334] On day 1, C57BL6 (Female, 8 weeks) are separated into four groups as follows: Group 1: H2O control (n=10); Group 2: 100 mM butyrate (n=10); Group 3: streptomycin resistant Nissle (n=10); Group 4: SYN501 (n=10). Animals are weighed and feces is collected from the animals (T=0-time point). Animals are changed to H2O (+) antibiotic cocktail. On day 5, animals are weighed and feces is collected (time point T=5d). The H2O (+) antibiotic cocktail bottles are changed. On day 8, the mice are weighed and feces is collected. Mice of Group 3 and Group 4 are gavaged in the AM and PM with streptomycin resistant Nissle or SYN501. The water in all cages is changed to water without antibiotic. Group 2 is provided with 100 mM butyrate in H2O. On days 9-11, mice are weighed, and mice of Group 3 and Group 4 are gavaged in the AM and PM with streptomycin resistant Nissle or SYN501. On day 12, mice are gavaged with streptomycin resistant Nissle or SYN501 in the AM, and 4 hours post dose, blood is harvested, and cecal and large intestinal contents, and tissue, and feces are collected and processed for analysis.

### Example 17. Comparison of Butyrate Production Levels Between the Genetically Engineered Bacteria Encoding a Butyrate Cassette and Selected Clostridia Strains

[1335] The efficacy of pbutyrate production in SYN501 (pSC101 PydfZ-ter->pbt-buk butyrate plasmid) was compared to CBM588 (Clostridia butyricum MIYARISAN, a Japanese probiotic strain), Clostridium tyrobutyricum VPI 5392 (Type Strain), and Clostridium butyricum NCTC 7423 (Type Strain).

[1336] Briefly, overnight cultures of SYN501 were diluted 1:100 were grown in RCM (Reinforced Clostridial Media, which is similar to LB but contains 0.5% glucose) at 37 C with shaking for 2 hours, then either moved into the anaerobic chamber or left aerobically shaking. Clostridial strains were only grown anaerobically. At indicated times (2, 8, 24, and 48 h), 120 ul cells were removed and pelleted at 14,000 rpm for Imin, and 100 ul of the supernatant was transferred to a 96-well assay plate and sealed with aluminum foil, and stored at −80 C until analysis by LC-MS for butyrate concentrations (as described in Example 18). Results are depicted in FIG. 18, and show that SYN501 produces butyrate levels comparable to Clostridium spp. in RCM media

### Example 18. Quantification of Butyrate by LC-MS/MS

[1337] To obtain the butyrate measurements in Example 37 a LC-MS/MS protocol for butyrate quantification was used.

[1338] Sample Preparation

[1339] First, fresh 1000, 500, 250, 100, 20, 4 and 0.8 g/mL sodium butyrate standards were prepared in water. Then, 10 μL of sample (bacterial supernatants and standards) were pipetted into a V-bottom polypropylene 96-well plate, and 90 μL of 67% ACN (60 uL ACN+30 uL water per reaction) with 4 ug/mL of butyrate-d7 (CDN isotope) internal standard in final solution were added to each sample. The plate was heat-sealed, mixed well, and centrifuged at 4000 rpm for 5 minutes. In a round-bottom 96-well polypropylene plate, 20 μL of diluted samples were added to 180 μL of a buffer containing 10 mM MES pH4.5, 20 mM EDC (N-(3-Dimethylaminopropyl)-N′-ethylcarbodiimide), and 20 mM TFEA (2,2,2-trifluroethylamine). The plate was again heat-sealed and mixed well, and samples were incubated at room temperature for 1 hour.

[1340] LC-MS/MS Method

[1341] Butyrate was measured by liquid chromatography coupled to tandem mass spectrometry (LC-MS/MS) using a Thermo TSQ Quantum Max triple quadrupole mass spectrometer. HPLC Details are listed in Table 49 and Table 50. Tandem Mass Spectrometry details are found in Table 51.

TABLE 49
HPLC Details

| | |
|---|---|
| Column | Thermo Aquasil C18 column, 5 μm (50 × 2.1 mm) |
| Mobile Phase A | 100% H2O, 0.1% Formic Acid |
| Mobile Phase B | 100% ACN, 0.1% Formic Acid |
| Injection volume | 10 uL |

TABLE 50
HPLC Method

| Total Time (min) | Flow Rate (μL/min) | A % | B % |
|---|---|---|---|
| 0 | 0.5 | 100 | 0 |
| 1 | 0.5 | 100 | 0 |
| 2 | 0.5 | 10 | 90 |
| 4 | 0.5 | 10 | 90 |
| 4.01 | 0.5 | 100 | 0 |
| 4.25 | 0.5 | 100 | 0 |

TABLE 51
Tandem Mass Spectrometry Details

| | |
|---|---|
| Ion Source | HESI-II |
| Polarity | Positive |
| SRM | Butyrate 170.0/71.1, |
| transitions | Butyrate d7 177.1/78.3 |

### Example 19. Quantification of Butyrate in Feces by LC-MS/MS Sample Preparation

[1342] Fresh 1000, 500, 250, 100, 20, 4 and 0.8 μg/mL sodium butyrate standards were prepared in water. Single fecal pellets were ground in 100 uL water and centrifuged at 15,000 rpm for 5 min at 4° C. 10 μL of the sample (fecal supernatant and standards) were pipetted into a V-bottom polypropylene 96-well plate, and 901VL of the derivatizing solution containing 50 mM of 2-Hydrazinoquinoline (2-HQ), dipyridyl disulfide, and triphenylphospine in acetonitrile with 5 ug/mL of butyrate-d7 were added to each sample. The plate was heat-sealed and incubated at 60° C. for 1 hr. The plate was then centrifuged at 4,000 rpm for 5 min and 20 μL of the derivatized samples mixed to 180 μL of 22% acetonitrile with 0.1% formic acid.

[1343] LC-MS/MS Method

[1344] Butyrate was measured by liquid chromatography coupled to tandem mass spectrometry (LC-MS/MS) using a Thermo TSQ Quantum Max triple quadrupole mass spectrometer. HPLC Details are listed in Table 52 and Table 53. Tandem Mass Spectrometry details are found in Table 54.

TABLE 52
HPLC Details

| | |
|---|---|
| Column | Luna phenomenex C18 column, 5 μm (100 × 2.1 mm) |
| Mobile Phase A | 100% H2O, 0.1% Formic Acid |
| Mobile Phase B | 100% ACN, 0.1% Formic Acid |
| Injection volume | 10 uL |

TABLE 53
HPLC Method

| Total Time (min) | Flow Rate (μL/min) | A % | B % |
|---|---|---|---|
| 0 | 0.5 | 95 | 5 |
| 0.5 | 0.5 | 95 | 5 |
| 1.5 | 0.5 | 10 | 90 |
| 3.5 | 0.5 | 10 | 90 |
| 3.51 | 0.5 | 95 | 5 |
| 3.75 | 0.5 | 95 | 5 |

TABLE 54A
Tandem Mass Spectrometry Details

| | |
|---|---|
| Ion Source | HESI-II |
| Polarity | Positive |
| SRM | Butyrate 230.1/143.1, |
| transitions | Butyrate d7 237.1/143.1 |

### Example 20. Generation of Butyrate and Acetate Producing Strains

[1345] A. Generation of an Acetate Overproducing Strain

[1346] E. coli generates high levels of acetate as an end product of fermentation. In order generate enhanced acetate production, strain SYN2001 was generated, which harbors a deletion in the endogenous ldh (lactate dehydrogenase) gene, with the intention to prevent or reduce flux through the metabolic arm generating lactate, and thereby enhancing the flux through the metabolic arm generating acetate (see, e.g., FIG. 25).

[1347] Briefly, We deleted the gene encoding L-lactate dehydrogenase A (ldhA) to block carbon flux from pyruvate to lactate and improve acetate biosynthetic yield in E. coli Nissle. Knockout primers were synthesized (IDT) and a chloramphenicol-resistance antibiotic marker was inserted in place of the ldhA coding region to ensure the removal of the targeted gene. The ldhA gene on the E. coli Nissle genome was knocked out and replaced with the chloramphenicol resistance gene through allelic exchange, which was facilitated by the lambda red recombinase system. Proper knockout of the target gene in the Nissle genome was validated by the ability of the resulting Nissle strain to grow on chloramphenicol-containing LB plates or medium and further confirmed by PCR. This strain was designated SYN2001.

[1348] For this study, media M9 media containing 50 mM MOPS with 0.5% glucose was compared to media containing 0.5% glucuronic acid, as glucuronic acid better mimics available carbon sources in the gut.

[1349] SYN2001 and streptomycin resistant E. coli Nissle (SYN094) were grown overnight at 37 C with shaking. Overnight cultures were diluted 1:100 into 10 ml LB (containing antibiotics) in a 125 ml baffled flask. Cultures were grown aerobically at 37 C with shaking for about 1.5 h, and then transferred to the anaerobic chamber at 37 C for 4 h. Bacteria (2×10⁸ CFU) were added to 1 ml M9 media containing 50 mM MOPS with 0.5% glucose or 0.5% glucuronic acid in microcentrifuge tubes. Cells were plated to determine cell counts. The assay tubes were placed in the anaerobic chamber at 37 C. At 1, 2, 3, 4, 5, and 6 hours, cells were removed and pelleted at 14,000 rpm for 1 min, and 100 ul of the supernatant was transferred to a 96-well assay plate and sealed with aluminum foil, and stored at −80 C until analysis by LC-MS for acetate concentrations as described herein, e.g., in Example 21.

TABLE 54B
Acetate production by SYN2001 from three different manufacturing experiments

| | Run1 | | Run 2 | | Run 3 | |
|---|---|---|---|---|---|---|
| | [Acetate] | | [Acetate] | | [Acetate] | |
| Strain | in mM | SD | in mM | SD | in mM | SD |
| SYN2001 | 24.43737 | 2.970942327 | 21.26342667 | 1.719791084 | 31.58750134 | 6.68461575 |

[1350] Culture supernatants of SYN2001 produced between 21.2 and 31.5 mM acetate and an undetectable amount of butyrate (data not shown) under the above conditions in 3 independent production runs. Culture supernatant from run 3 was then used to generate the bioactivity results from cell based assays presented below in Example 63.

[1351] As seen in FIG. 26A and FIG. 26B, the ldhA knockout E. coli Nissle strain SYN2001 has improved acetate productivity during over a 6 hour time course using either glucose or glucuronic acid as the main carbon source.

[1352] B. Generation of Strains which Produces Butyrate and Acetate

[1353] a. Knock Out of the Endogenous adhE and ldhA Genes

[1354] In order to improve acetate production while also producing high levels butyrate production, deletions in endogenous adhE (Aldehyde-alcohol dehydrogenase) and ldh (lactate dehydrogenase) were generated to prevent or reduce metabolic flux through pathways which do not result in acetate or butyrate production (see, e.g., FIG. 25). Aldehyde-alcohol dehydrogenase converts acetylCoA into acetaldehyde, which is then converted to ethanol. As a result, a mutation or deletion of adhE is expected to prevent the metabolic flux towards ethanol production and consequently allow for additional acetylCoA to be used for butyrate production. For this study, Nissle strains with either integrated FNRS ter-tesB or FNRS-ter-pbt-buk butyrate cassettes were used. Additionally, media M9 media containing 50 mM MOPS with 0.5% glucose was compared to media containing 0.5% glucuronic acid, as glucuronic acid better mimics available carbon sources in the gut.

[1355] Briefly, bacteria were grown overnight at 37 C with shaking. Overnight cultures were diluted 1:100 into 10 ml LB (containing antibiotics) in a 125 ml baffled flask. Cultures were grown aerobically at 37 C with shaking for about 1.5 h, and then transferred to the anaerobic chamber at 37 C for 4 h. Bacteria (2×10⁸ CFU) were added to 1 ml M9 media containing 50 mM MOPS with 0.5% glucose or 0.5% glucuronic acid in microcentrifuge tubes. Cells were plated to determine cell counts. The assay tubes were placed in the anaerobic chamber at 37 C. At 18 hours, cells were removed and pelleted at 14,000 rpm for 1 min, and 100 ul of the supernatant was transferred to a 96-well assay plate and sealed with aluminum foil, and stored at −80 C until analysis by LC-MS for butyrate and acetate concentrations as described herein, e.g., in Example 21.

[1356] As seen in FIG. 26C and FIG. 26D, both integrated strains made similar amounts of acetate, and FNRS-ter-pbt-buk butyrate cassettes produced slightly more butyrate. Deletions in adhE and ldhA have similar effects on butyrate and acetate production. Acetate production was much greater in media containing 0.5% glucuronic acid.

[1357] b. Knock Out of the Endogenous frdA Gene

[1358] FrdA is one of two catalytic subunits in the four subunit fumarate reductase complex. Fumarate reductase converts fumarate (derived from phosphoenolpyruvate) to succinate along one arm of anaerobic metabolism. In a second study, the effect of a deletion in the endogenous frdA gene, which prevents metabolic flux through the phosphoenolpyruvate->succinate pathway, on acetate and butyrate production was assessed. For this study, SYN2005 (comprising FNRS-ter-tesB butyrate cassette integrated at the HA1/2 site and a deletion in the endogenous frd gene) was compared to SYN1004 (comprising the FNRS-ter-tesB butyrate cassette integrated at the HA1/2 site).

[1359] Bacteria were grown overnight at 37 C with shaking. Overnight cultures were diluted 1:100 into 10 ml LB (containing antibiotics) in a 125 ml baffled flask. Cultures were grown aerobically at 37 C with shaking for about 1.5 h, and then transferred to the anaerobic chamber at 37 C for 4 h. Bacteria (2×10⁸ CFU) were added to 1 ml M9 media containing 50 mM MOPS with 0.5% glucose in microcentrifuge tubes. Cells were plated to determine cell counts. The assay tubes were placed in the anaerobic chamber at 37 C. At 18 hours, cells were removed and pelleted at 14,000 rpm for 1 min, and 100 ul of the supernatant was transferred to a 96-well assay plate and sealed with aluminum foil, and stored at −80 C until analysis by LC-MS for butyrate and acetate concentrations as described herein, e.g., in Example 21.

[1360] Results are depicted in FIG. 26E and indicate that the frdA mutation in SYN2005 allowed increased acetate production relative to SYN1173. SYN1173 produces greater levels of butyrate than acetate, while SYN2005 produces similar levels of both acetate and butyrate.

[1361] In other studies, strains are generated with combinations of deletions in two or more of the aldE, ldhA, and frd genes and the effect of the deletions on acetate and butyrate production are assessed.

[1362] C. Butyrate Only Producing Strains

[1363] In order to generate a strain which can produce butyrate, but has a reduced ability to produce acetate, a deletion in the pta gene was introduced into a strain that contains an integrated butyrate cassette (Ter/TesB cassette) under the control of an FNR promoter (SYN2002). Phosphate acetyltransferase (Pta) catalyzes the conversion between acetyl-CoA and acetylphosphate, the first step in the metabolic arm leading to the generation of acetate (see., e.g., FIG. 25). As such inhibition of this step was assumed to help prevent accumulation of acetate. Additionally, a mutation in the adhE (aldehyde-alcohol dehydrogenase) gene was introduced.

[1364] Acetate and butyrate production in both strains was compared to a third strain which contains both the FNR-driven ter-pbt-buk butyrate cassette and the deletion in the endogenous ldhA gene (e.g., as described above).

[1365] For this study, bacteria from all three strains were grown overnight at 37 C with shaking. Overnight cultures were diluted 1:100 into 10 ml LB (containing antibiotics) in a 125 ml baffled flask. Cultures were grown aerobically at 37 C with shaking for about 1.5 h, and then transferred to the anaerobic chamber at 37 C for 4 h. Bacteria (2×10⁸ CFU) were added to 1 ml M9 media containing 50 mM MOPS with 0.5% glucose in microcentrifuge tubes. Cells were plated to determine cell counts. The assay tubes were placed in the anaerobic chamber at 37 C. At 18 hours, cells were removed and pelleted at 14,000 rpm for 1 min, and 100 ul of the supernatant was transferred to a 96-well assay plate and sealed with aluminum foil, and stored at −80 C until analysis by LC-MS for butyrate and acetate concentrations as described herein, e.g., in Example 21.

[1366] Results are depicted in FIG. 26F, and show that the strain comprising the deletion in the endogenous ldhA gene produced acetate but no butyrate, the strain comprising the FNR-ter-tesB butyrate cassette and the aldhE deletion produced butyrate, but very low levels of acetate. The third strain, comprising the FNRter-tesB butyrate cassette and the deletions in the adhE and pta genes, made equal amounts of acetate and butyrate.

### Example 21. Acetate and Butyrate Quantification in Bacterial Supernatant by LC-MS/MS

### Sample Preparation

[1367] Ammonium acetate and Sodium butyrate stock (10 mg/mL) was prepared in water and aliquoted in 1.5 mL microcentrifuge tubes (100 μL) and stored at −20° C. Standards (1000, 500, 250, 100, 20, 4, 0.8 μg/mL) were prepared in water. Sample and standards (10 μL) were pipetted in a V-bottom polypropylene 96-well plate on ice. Derivatizing solution (90 μL) containing 50 mM of 2-Hydrazinoquinoline (2-HQ), dipyridyl disulfide, and triphenylphosphine in acetonitrile with 2 ug/mL of Sodium butyrate-d7 was added into the final solution. The plate was then heat-sealed with a ThermASeal foil and mixed well, and the samples were incubated at 60° C. for 1 hr for derivatization and centrifuged at 4000 rpm for 5 min. The derivatized samples (20 μL) were added to 180 μL of 0.1% formic acid in water/ACN (140:40) in a round-bottom 96-well plate. The plate was then heat-sealed with a ClearASeal sheet and mixed well.

### LC-MS/MS Method

[1368] Derivatized metabolites were measured by liquid chromatography coupled to tandem mass spectrometry (LC-MS/MS) using a Thermo TSQ Quantum Max triple quadrupole mass spectrometer. Table 55 and Table 56 provides the summary of the LC-MS/MS method.

TABLE 55

| | |
|---|---|
| Column: | C18 column, 3 μm (100 × 2 mm) |
| Mobile Phase A: | 100% H20, 0.1% Formic Acid |
| Mobile Phase B: | 100% ACN, 0.1% Formic Acid |
| Injection volume: | 10 uL |

TABLE 56
HPLC Method:

| Time (min) | Flow Rale (μL/min) | A % | B % |
|---|---|---|---|
| 0 | 500 | 95 | 5 |
| 0.5 | 500 | 95 | 5 |
| 2.0 | 500 | 10 | 90 |
| 3.0 | 500 | 10 | 90 |
| 3.01 | 500 | 95 | 5 |
| 3.25 | 500 | 95 | 5 |

Table 57 summarizes Tandem Mass Spectrometry.

TABLE 57
Tandem Mass Spectrometry:

| | |
|---|---|
| Ion Source: | HESI-II |
| Polarity: | Positive |

SRM transitions:

| | |
|---|---|
| Acetate: | 202.1/143.1 |
| Butyrate: | 230.1/160.2 |
| Butyrate-d7: | 237.1/160.2 |

### Example 22. Production of Propionate Through the Sleeping Beauty Mutase Pathway in Genetically Engineered E. coli BW25113 and Nissle

[1369] In E. coli, a four gene operon, sbm-ygfD-ygfD-ygfH (sleeping beauty mutase pathway) has been shown to encode a putative cobalamin-dependent pathway with the ability to produce propionate from succinate in vitro. While the sleeping beauty mutase pathway is present in E. coli, it is not under the control of a strong promoter and has shown low activity in vivo.

[1370] The utility of this operon for the production of propionate was assessed. Because E. coli Nissle does not have the complete operon, initial experiments were conducted in E. coli K12 (BW25113).

[1371] First, the native promoter for the sleeping beauty mutase operon on the chromosome in the BW25113 strain was replaced with a fnr promoter (BW25113 ldhA::frt; PfnrS-SBM-cam). The sequence for this construct is provided in Table 58. Mutation of the lactate dehydrogenase gene (ldhA) reportedly increases propionate production, and this mutation is therefore also added in certain embodiments.

[1372] In some embodiments, genetically engineered bacteria comprise a nucleic acid sequence that is at least about 80%, at least about 85%, at least about 90%, at least about 95%, or at least about 99% homologous to the DNA sequence of SEQ ID NO: 184, or 184, or a functional fragment thereof.

TABLE 58
SBM Construct Sequences

| Description | Sequence |
|---|---|
| BW25113 fnrS SBM construct | [symbol] [symbol] [symbol] |
| (BW25113 frt-cam-frt-PfnrS- sbm, | [symbol] [symbol] [symbol] |
| ygfD, ygfG, ygfH), comprising rmB | [symbol] [symbol] CCGCCGGGAGCG |
| terminator 1, rrnB terminator 2 (both | GATTTGAACGTTGCGAAGCAACGGCCCGGA |
| italic, uppercase), cat promoter and cam | GGGTGGCGGGCAGGACGCCCGCCATAAACT |
| resistance gene (encoded on the | GCCAGGCATCAAATTAAGC [symbol] |
| lagging strand underlined | [symbol] [symbol] TGCGTGGCCAGTGCCAA |
| uppercase), frt sites (italic underlined), | GCTTGCATGCAGATTGCAGCATTACACGTCT |
| FNRS promoter bold lowercase, with | TGAGCGATTGTGTAGGCTGGAGCTGCTTC [symbol] |
| RBS and leader region bold and | [symbol] [symbol] [symbol] |
| underlined and FNR binding site in bold | [symbol] ATTTAAATGGCGCGCCTTAC |
| and italics); sleeping beauty operon | GCCCCGCCCTGCCACTCATCGCAGTACTGTT |
| (sbm, ygfD, ygfG, ygfH) bold and | GTATTCATTAAGCATCTGCCGACATGGAAGC |
| uppercase | CATCACAAACGGCATGATGAACCTGAATCGC |

| | |
|---|---|
| (SEQ ID NO: 183 | CAGCGGCATCAGCACCTTGTCGCCTTGCGTA |
| | TAATATTTGCCCATGGTGAAAACGGGGGCGA |
| | AGAAGTTGTCCATATTGGCCACGTTTAAATC |
| | AAAACTGGTGAAACTCACCCAGGGATTGGCT |
| | GAGACGAAAAACATATTCTCAATAAACCCTT |
| | TAGGGAAATAGGCCAGGTTTTCACCGTAACA |
| | CGCCACATCTTGCGAATATATGTGTAGAAAC |
| | TGCCGGAAATCGTCGTGGTATTCACTCCAGA |
| | GCGATGAAAACGTTTCAGTTTGCTCATGGAA |
| | AACGGTGTAACAAGGGTGAACACTATCCCAT |
| | ATCACCAGCTCACCGTCTTTCATTGCCATAC |
| | GTAATTCCGGATGAGCATTCATCAGGCGGGC |
| | AAGAATGTGAATAAAGGCCGGATAAAACTTG |
| | TGCTTATTTTTCTTTACGGTCTTTAAAAAGGC |
| | CGTAATATCCAGCTGAACGGTCTGGTTATAG |
| | GTACATTGAGCAACTGACTGAAATGCCTCAA |
| | AATGTTCTTTACGATGCCATTGGGATATATC |
| | AACGGTGGTATATCCAGTGATTTTTTTCTCC |
| | ATTTTAGCTTCCTTAGCTCCTGAAAATCTCGA |
| | CAACTCAAAAAATACGCCCGGTAGTGATCTT |
| | ATTTCATTATGGTGAAAGTTGGAACCTCTTA |
| | CGTGCCGATCAACGTCTCATTTTCGCCAAAA |
| | GTTGGCCCAGGGCTTCCCGGTATCAACAGGG |
| | ACACCAGGATTTATTTATTCTGCGAAGTGAT |
| | CTTCCGTCACAGGTAGGCGCGCC [symbol] |
| | GGAATAG [symbol] [symbol] [symbol] |
| | GAACTAAGGAGGATATTCATATGGACCATGG |
| | CTAATTCCCAGGTACCagttgttcttattggtggtgttgcttt |
| | atggttgcatcgtagtaaatggttgtaacaaaagcaatttttccggctgtct |
| | gtatacaaaaacgccgcaaagtttgagcgaagtcaataaactctctaccc |
| | attcagggcaatatctctcttggatccaaagtgaactctagaaataattttg |
| | tttaactttaagaaggagatatacatATGTCTAACGTGCAG |
| | GAGTGGCAACAGCTTGCCAACAAGGAATTGA |
| | GCCGTCGGGAGAAAACTGTCGACTCGCTGGT |
| | TCATCAAACCGCGGAAGGGATCGCCATCAAG |
| | CCGCTGTATACCGAAGCCGATCTCGATAATC |
| | TGGAGGTGACAGGTACCCTTCCTGGTTTGCC |
| | GCCCTACGTTCGTGGCCCGCGTGCCACTATG |
| | TATACCGCCCAACCGTGGACCATCCGTCAGT |
| | ATGCTGGTTTTTCAACAGCAAAAGAGTCCAA |
| | CGCTTTTTATCGCCGTAACCTGGCCGCCGGG |
| | CAAAAAGGTCTTTCCGTTGCGTTTGACCTTG |
| | CCACCCACCGTGGCTACGACTCCGATAACCC |
| | GCGCGTGGCGGGCGACGTCGGCAAAGCGGG |
| | CGTCGCTATCGACACCGTGGAAGATATGAAA |
| | GTCCTGTTCGACCAGATCCCGCTGGATAAAA |
| | TGTCGGTTTCGATGACCATGAATGGCGCAGT |
| | GCTACCAGTACTGGCGTTTTATATCGTCGCC |
| | GCAGAAGAGCAAGGTGTTACACCTGATAAAC |
| | TGACCGGCACCATTCAAAACGATATTCTCAA |
| | AGAGTACCTCTGCCGCAACACCTATATTTAC |
| | CCACCAAAACCGTCAATGCGCATTATCGCCG |
| | ACATCATCGCCTGGTGTTCCGGCAACATGCC |
| | GCGATTTAATACCATCAGTATCAGCGGTTAC |
| | CACATGGGTGAAGCGGGTGCCAACTGCGTG |
| | CAGCAGGTAGCATTTACGCTCGCTGATGGGA |
| | TTGAGTACATCAAAGCAGCAATCTCTGCCGG |
| | ACTGAAAATTGATGACTTCGCTCCTCGCCTG |
| | TCGTTCTTCTTCGGCATCGGCATGGATCTGT |
| | TTATGAACGTCGCCATGTTGCGTGCGGCACG |
| | TTATTTATGGAGCGAAGCGGTCAGTGGATTT |
| | GGCGCACAGGACCCGAATCACTGGCGCTG |
| | CGTACCCACTGCCAGACCTCAGGCTGGAGCC |
| | TGACTGAACAGGATCCGTATAACAACGTTAT |
| | CCGCACCACCATTGAAGCGCTGGCTGCGACG |
| | CTGGGCGGTACTCAGTCACTGCATACCAACG |
| | CCTTTGACGAAGCGCTTGGTTTGCCTACCGA |
| | TTTCTCAGCACGCATTGCCCGCAACACCCAG |
| | ATCATCATCCAGGAAGAATCAGAACTCTGCC |
| | GCACCGTCGATCCACTGGCCGGATCCTATTA |
| | CATTGAGTCGCTGACCGATCAAATCGTCAAA |
| | CAAGCCAGAGCTATTATCCAACAGATCGACG |
| | AAGCCGGTGGCATGGCGAAAGCGATCGAAG |
| | CAGGTCTGCCAAAACGAATGATCGAAGAGGC |
| | CTCAGCGCGCGAACAGTCGCTGATCGACCAG |
| | GGCAAGCGTGTCATCGTTGGTGTCAACAAGT |
| | ACAAACTGGATCACGAAGACGAAACCGATGT |
| | ACTTGAGATCGACAACGTGATGGTGCGTAAC |
| | GAGCAAATTGCTTCGCTGGAACGCATTCGCG |
| | CCACCCGTGATGATGCCGCCGTAACCGCCGC |
| | GTTGAACGCCCTGACTCACGCCGCACAGCAT |
| | AACGAAAACCTGCTGGCTGCCGCTGTTAATG |
| | CCGCTCGCGTTCGCGCCACCCTGGGTGAAAT |
| | TTCCGATGCGCTGGAAGTCGCTTTCGACCGT |
| | TATCTGGTGCCAAGCCAGTGTGTTACCGGCG |
| | TGATTGCGCAAAGCTATCATCAGTCTGAGAA |
| | ATCGGCCTCCGAGTTCGATGCCATTGTTGCG |
| | CAAACGGAGCAGTTCCTTGCCGACAATGGTC |
| | GTCGCCCGCGCATTCTGATCGCTAAGATGGG |
| | CCAGGATGGACACGATCGCGGCGCGAAAGT |
| | GATCGCCAGCGCCTATTCCGATCTCGGTTTC |
| | GACGTAGATTTAAGCCCGATGTTCTCTACAC |
| | CTGAAGAGATCGCCCGCCTGGCCGTAGAAAA |
| | CGACGTTCACGTAGTGGGCGCATCCTCACTG |
| | GCTGCCGGTCATAAAACGCTGATCCCGGAAC |
| | TGGTCGAAGCGCTGAAAAAATGGGGACGCG |
| | AAGATATCTGCGTGGTCGCGGGTGGCGTCAT |
| | TCCGCCGCAGGATTACGCCTTCCTGCAAGAG |
| | CGCGGCGTGGCGGCGATTTATGGTCCAGGT |
| | ACACCTATGCTCGACAGTGTGCGCGACGTAC |
| | TGAATCTGATAAGCCAGCATCATGATTAATG |
| | AAGCCACGCTGGCAGAAAGTATTCGCCGCTT |
| | ACGTCAGGGTGAGCGTGCCACACTCGCCCA |
| | GGCCATGACGCTGGTGGAAAGCCGTCACCC |
| | GCGTCATCAGGCACTAAGTACGCAGCTGCTT |
| | GATGCCATTATGCCGTACTGCGGTAACACCC |
| | TGCGACTGGGCGTTACCGGCACCCCCGGCG |
| | CGGGGAAAAGTACCTTTCTTGAGGCCTTTGG |
| | CATGTTGTTGATTCGAGAGGGATTAAAGGTC |
| | GCGGTTATTGCGGTCGATCCCAGCAGCCCGG |
| | TCACTGGCGGTAGCATTCTCGGGGATAAAAC |
| | CCGCATGAATGACCTGGCGCGTGCCGAAGC |
| | GGCGTTTATTCGCCCGGTACCATCCTCCGGT |
| | CATCTGGGCGGTGCCAGTCAGCGAGCGCGG |
| | GAATTAATGCTGTTATGCGAAGCAGCGGGTT |
| | ATGACGTAGTGATTGTCGAAACGGTTGGCGT |
| | CGGGCAGTCGGAAACAGAAGTCGCCCGCAT |
| | GGTGGACTGTTTTATCTCGTTGCAAATTGCC |
| | GGTGGCGGCGATGATCTGCAGGGCATTAAA |
| | AAAGGGCTGATGGAAGTGGCTGATCTGATCG |
| | TTATCAACAAAGACGATGGCGATAACCATAC |
| | CAATGTCGCCATTGCCCGGCATATGTACGAG |
| | AGTGCCCTGCATATTCTGCGACGTAAATACG |
| | ACGAATGGCAGCCAGGGTTCTGACTTGTAG |
| | CGCACTGGAAAAACGTGGAATCGATGAGATC |
| | TGGCACGCCATCATCGACTTCAAAACCGCGC |
| | TAACTGCCAGTGGTCGTTTACAACAAGTGCG |
| | GCAACAACAATCGGTGGAATGGCTGCGTAAG |
| | CAGACCGAAGAAGAAGTACTGAATCACCTGT |
| | TCGCGAATGAAGATTTCGATCGCTATTACCG |
| | CCAGACGCTTTTAGCGGTCAAAAACAATACG |
| | CTCTCACCGCGCACCGGCCTGCGGCAGCTCA |
| | GTGAATTTATCCAGACGCAATATTTTGATTA |
| | AAGGAATTTTTATGTCTTATCAGTATGTTAAC |
| | GTTGTCACTATCAACAAAGTGGCGGTCATTG |
| | AGTTTAACTATGGCCGAAAACTTAATGCCTT |
| | AAGTAAAGTCTTTATTGATGATCTTATGCAG |
| | GCGTTAAGCGATCTCAACCGGCCGGAAATTC |
| | GCTGTATCATTTTGCGCGCACCGAGTGGATC |
| | CAAAGTCTTCTCCGCAGGTCACGATATTCAC |
| | GAACTGCCGTCTGGCGGTCGCGATCCGCTCT |
| | CCTATGATGATCCATTGCGTCAAATCACCCG |
| | CATGATCCAAAAATTCCCGAAACCGATCATT |
| | TCGATGGTGGAAGGTAGTGTTTGGGGTGGC |
| | GCATTTGAAATGATCATGAGTTCCGATCTGA |
| | TCATCGCCGCCAGTACCTCAACCTTCTCAAT |
| | GASGCCTGTAAACCTCGGCGTCCCGTATAAC |
| | CTGGTCGGCATTCACAACCTGACCCGCGACG |
| | CGGGCTTCCACATTGTCAAAGAGCTGATTTT |
| | TACCGCTTCGCCAATCACCGCCCAGCGCGCG |
| | CTGGCTGTCGGCATCCTCAACCATGTTGTGG |
| | AAGTGGAAGAACTGGAAGATTTCACCTTACA |
| | AATGGCGCACCACATCTCTGAGAAAGCGCCG |
| | TTAGCCATTGCCGTTATCAAAGAAGAGCTGC |
| | GTGTACTGGGCGAAGCACACACCATGAACTC |
| | CGATGAATTTGAACGTATTCAGGGGATGCGC |
| | CGCGCGGTGTATGACAGCGAAGATTACCAG |
| | GAAGGGATGAACGCTTTCCTCGAAAAACGTA |
| | AACCTAATTTCGTTGGTCATTAATCCCTGCGA |
| | ACGAAGGAGTAAAAATGGAAACTCAGTGGAC |
| | AAGGATGACCGCCAATGAAGCGGCAGAAATT |
| | ATCCAGCATAACGACATGGTGGCATTTAGCG |
| | GCTTTACCCCGGCGGGTTCGCCGAAAGCCCT |
| | ACCCACCGCGATTGCCCGCAGAGCTAACGAA |
| | CAGCATGAGGCCAAAAAGCCGTATCAAATTC |
| | GCCTTCTGACGGGTGCGTCAATCAGCGCCGC |
| | CGCTGACGATGTACTTTCTGACGCCGATGCT |
| | GTTTCCTGGCGTGCGCCATATCAAACATCGT |
| | CCGGTTTACGTAAAAAGATCAATCAGGGCGC |
| | GGTGAGTTTCGTTGACCTGCATTTGAGCGAA |
| | GTGGCGCAAATGGTCAATTACGGTTTCTTCG |
| | GCGACATTGATGTTGCCGTCATTGAAGCATC |
| | GGCACTGGCACCGGATGGTCGAGTCTGGTTA |
| | ACCAGCGGGATCGGTAATGCGCCGACCTGG |
| | CTGCTGCGGGCGAAGAAAGTGATCATTGAAC |
| | TCAATCACTATCACGATCCGCGCGTTGCAGA |
| | ACTGGCGGATATTGTGATTCCTGGCGCGCCA |
| | CCGCGGCGCAATAGCGTGTCGATCTTCCATG |
| | CAATGGATCGCGTCGGTACCCGCTATGTGCA |
| | AATCGATCCGAAAAAGATTGTCGCCGTCGTG |
| | GAAACCAACTTGCCCGACGCCGGTAATATGC |
| | TGGATAAGCAAAATCCCATGTGCCAGCAGAT |
| | TGCCGATAACGTGGTCACGTTCTTATTGCAG |
| | GAAATGGCGCATGGGCGTATTCCGCCGGAAT |
| | TTCTGCCGCTGCAAAGTGGCGTGGGCAATAT |
| | CAATAATGCGGTAATGGCGCGTCTGGGGGA |
| | AAACCCGGTAATTCCTCCGTTTATGATGTAT |
| | TCGGAAGTGCTACAGGAATCGGTGGTGCATT |
| | TACTGGAAACCGGCAAAATCAGCGGGGCCA |
| | GCGCCTCCAGCCTGACAATCTCGGCCGATTC |
| | CCTGCGCAAGATTTACGACAATATGGATTAC |
| | TTTGCCAGCCGCATTGTGTTGCGTCCGCAGG |
| | AGATTTCCAATAACCCGGAAATCATCCGTCG |
| | TCTGGGCGTCATCGCTCTGAACGTCGGCCTG |
| | GAGTTTGATATTTACGGGCATGCCAACTCAA |
| | CACACGTAGCCGGGGTCGATCTGATGAACG |
| | GCATCGGCGGCAGCGGTGATTTTGAACGCAA |
| | CGCGTATCTGTCGATCTTTATGGCCCCGTCG |
| | ATTGCTAAAGAAGGCAAGATCTCAACCGTCG |
| | TGCCAATGTGCAGCCATGTTGATCACAGCGA |
| | ACACAGCGTCAAAGTGATCATCACCGAACAA |
| | GGGATCGCCGATCTGCGCGGTCTTTCCCCGC |
| | TTCAACGCGCCCGCACTATCATTGATAATTG |
| | TGCACATCCTATGTATCGGGATTATCTGCAT |
| | CGCTATCTGGAAAATGCGCCTGGCGGACATA |
| | TTCACCACGATCTTAGCCACGTCTTCGACTT |
| | ACACCGTAATTTAATTGCAACCGGCTCGATG |
| | CTGGGTTAA |
| FNRS promoter bold lowercase, with | agttgttcttattggtggtgttgctttatggttgcatcgtagtaaatggttgta |
| RBS and leader region bold and | acaaaagcaatttttccggctgtctgtatacaaaaacgccgcaaag [symbol] |
| underlined, and FNR binding site bold | [symbol] taaactctctacccattcagggcaatatctctcttggatcc |
| and italics); sleeping beauty operon | aaagtgaactctagaaataattttatttaaagaaggagatatcat |
| (sbm ygflD, ygfG ygfH) bold and | ATGTCTAACGTGCAGGAGTGGCAACAGCTTG |
| uppercase | CCAACAAGGAATTGAGCCGTCGGGAGAAAA |
| (SEQ ID NO: 184) | CTGTCGACTCGCTGGTTCATCAAACCGCGGA |
| | AGGGATCGCCATCAAGCCGCTGTATACCGAA |
| | GCCGATCTCGATAATCTGGAGGTGACAGGTA |
| | CCCTTCCTGGTTTGCCGCCCTACGTTCGTGG |
| | CCCGCGTGCCACTATGTATACCGCCCAACCG |
| | TGGACCATCCGTCAGTATGCTGGTTTTTCAA |
| | CAGCAAAAGAGTCCAACGCTTTTTATCGCCG |
| | TAACCTGGCCGCCGGGCAAAAAGGTCTTTCC |
| | GTTGCGTTTGACCTTGCCACCCACCGTGGCT |
| | ACGACTCCGATAACCCGCGCGTGGCGGGCG |
| | ACGTCGGCAAAGCGGGCGTCGCTATCGACA |
| | CCGTGGAAGATATGAAAGTCCTGTTCGACCA |
| | GATCCCGCTGGATAAAATGTCGGTTTCGATG |
| | ACCATGAATGGCGCAGTGCTACCAGTACTGG |
| | CGTTTTATATCGTCGCCGCAGAAGAGCAAGG |
| | TGTTACACCTGATAAACTGACCGGCACCATT |
| | CAAAACGATATTCTCAAAGAGTACCTCTGCC |
| | GCAACACCTATATTTACCCACCAAAACCGTC |
| | AATGCGCATTATCGCCGACATCATCGCCTGG |
| | TGTTCCGGCAACATGCCGCGATTTAATACCA |
| | TCAGTATCAGCGGTTACCACATGGGTGAAGC |
| | GGGTGCCAACTGCGTGCAGCAGGTAGCATTT |
| | ACGCTCGCTGATGGGATTGAGTACATCAAAG |
| | CAGCAATCTCTGCCGGACTGAAAATTGATGA |
| | CTTCGCTCCTCGCCTGTCGTTCTTCTTCGGC |
| | ATCGGCATGGATCTGTTTATGAACGTCGCCA |
| | TGTTGCGTGCGGCACGTTATTTATGGAGCGA |
| | AGCGGTCAGTGGATTTGGCGCACAGGACCC |
| | GAAATCACTGGCGCTGCGTACCCACTGCCAG |
| | ACCTCAGGCTGGAGCCTGACTGAACAGGATC |
| | CGTATAACAACGTTATCCGCACCACCATTGA |
| | AGCGCTGGCTGCGACGCTGGGCGGTACTCA |
| | GTCACTGCATACCAACGCCTTTGACGAAGCG |
| | CTTGGTTTGCCTACCGATTTCTCAGCACGCA |
| | TTGCCCGCAACACCCAGATCATCATCCAGGA |
| | AGAATCAGAACTCTGCCGCACCGTCGATCCA |
| | CTGGCCGGATCCTATTACATTGAGTCGCTGA |
| | CCGATCAAATCGTCAAACAAGCCAGAGCTAT |
| | TATCCAACAGATCGACGAAGCCGGTGGCATG |
| | GCGAAAGCGATCGAAGCAGGTCTGCCAAAA |
| | CGAATGATCGAAGAGGCCTCAGCGCGCGAA |
| | CAGTCGCTGATCGACCAGGGCAAGCGTGTCA |
| | TCGTTGGTGTCAACAAGTACAAACTGGATCA |
| | CGAAGACGAAACCGATGTACTTGAGATCGAC |
| | AACGTGATGGTGCGTAACGAGCAAATTGCTT |
| | CGCTGGAACGCATTCGCGCCACCCGTGATGA |
| | TGCCGCCGTAACCGCCGCGTTGAACGCCCTG |
| | ACTCACGCCGCACAGCATAACGAAAACCTGC |
| | TGGCTGCCGCTGTTAATGCCGCTCGCGTTCG |
| | CGCCACCCTGGGTGAAATTTCCGATGCGCTG |
| | GAAGTCGCTTTCGACCGTTATCTGGTGCCAA |
| | GCCAGTGTGTTACCGGCGTGATTGCGCAAAG |
| | CTATCATCAGTCTGAGAAATCGGCCTCCGAG |
| | TTCGATGCCATTGTTGCGCAAACGGAGCAGT |
| | TCCTTGCCGACAATGGTCGTCGCCCGCGCAT |
| | TCTGATCGCTAAGATGGGCCAGGATGGACAC |
| | GATCGCGGCGCGAAAGTGATCGCCAGCGCC |
| | TATTCCGATCTCGGTTTCGACGTAGATTTAA |
| | GCCCGATGTTCTCTACACCTGAAGAGATCGC |
| | CCGCCTGGCCGTAGAAAACGACGTTCACGTA |
| | GTGGGCGCATCCTCACTGGCTGCCGGTCATA |
| | AAACGCTGATCCCGGAACTGGTCGAAGCGCT |
| | GAAAAAATGGGGACGCGAAGATATCTGCGT |
| | GGTCGCGGGTGGCGTCATTCCGCCGCAGGA |
| | TTACGCCTTCCTGCAAGAGCGCGGCGTGGCG |
| | GCGATTTATGGTCCAGGTACACCTATGCTCG |
| | ACAGTGTGCGCGACGTACTGAATCTGATAAG |
| | CCAGCATCATGATTAATGAAGCCACGCTGGC |
| | AGAAAGTATTCGCCGCTTACGTCAGGGTGAG |
| | CGTGCCACACTCGCCCAGGCCATGACGCTGG |
| | TGGAAAGCCGTCACCCGCGTCATCAGGCACT |
| | AAGTACGCAGCTGCTTGATGCCATTATGCCG |
| | TACTGCGGTAACACCCTGCGACTGGGCGTTA |
| | CCGGCACCCCCGGCGCGGGGAAAAGTACCT |
| | TTCTTGAGGCCTTTGGCATGTTGTTGATTCG |
| | AGAGGGATTAAAGGTCGCGGTTATTGCGGTC |
| | GATCCCAGCAGCCCGGTCACTGGCGGTAGC |
| | ATTCTCGGGGATAAAACCCGCATGAATGACC |
| | TGGCGCGTGCCGAAGCGGCGTTTATTCGCCC |
| | GGTACCATCCTCCGGTCATCTGGGCGGTGCC |
| | AGTCAGCGAGCGCGGGAATTAATGCTGTTAT |
| | GCGAAGCAGCGGGTTATGACGTAGTGATTGT |
| | CGAAACGGTTGGCGTCGGGCAGTCGGAAAC |
| | AGAAGTCGCCCGCATGGTGGACTGTTTTATC |
| | TCGTTGCAAATTGCCGGTGGCGGCGATGATC |
| | TGCAGGGCATTAAAAAAGGGCTGATGGAAGT |
| | GGCTGATCTGATCGTTATCAACAAAGACGAT |
| | GGCGATAACCATACCAATGTCGCCATTGCCC |
| | GGCATATGTACGAGAGTGCCCTGCATATTCT |
| | GCGACGTAAATACGACGAATGGCAGCCACG |
| | GGTTCTGACTTGTAGCGCACTGGAAAAACGT |
| | GGAATCGATGAGATCTGGCACGCCATCATCG |
| | ACTTCAAAACCGCGCTAACTGCCAGTGGTCG |
| | TTTACAACAAGTGCGGCAACAACAATCGGTG |
| | GAATGGCTGCGTAAGCAGACCGAAGAAGAA |
| | GTACTGAATCACCTGTTCGCGAATGAAGATT |
| | TCGATCGCTATTACCGCCAGACGCTTTTAGC |
| | GGTCAAAAACAATACGCTCTCACCGCGCACC |
| | GGCCTGCGGCAGCTCAGTGAATTTATCCAGA |
| | CGCAATATTTTGATTAAAGGAATTTTTATGTC |
| | TTATCAGTATGTTAACGTTGTCACTATCAACA |
| | AAGTGGCGGTCATTGAGTTTAACTATGGCCG |
| | AAAACTTAATGCCTTAAGTAAAGTCTTTATTG |
| | ATGATCTTATGCAGGCGTTAAGCGATCTCAA |
| | CCGGCCGGAAATTCGCTGTATCATTTTGCGC |
| | GCACCGAGTGGATCCAAAGTCTTCTCCGCAG |
| | GTCACGATATTCACGAACTGCCGTCTGGCGG |
| | TCGCGATCCGCTCTCCTATGATGATCCATTG |
| | CGTCAAATCACCCGCATGATCCAAAAATTCC |
| | CGAAACCGATCATTTCGATGGTGGAAGGTAG |
| | TGTTTGGGGTGGCGCATTTGAAATGATCATG |
| | AGTTCCGATCTGATCATCGCCGCCAGTACCT |
| | CAACCTTCTCAATGACGCCTGTAAACCTCGG |
| | CGTCCCGTATAACCTGGTCGGCATTCACAAC |
| | CTGACCCGCGACGCGGGCTTCCACATTGTCA |
| | AAGAGCTGATTTTTACCGCTTCGCCAATCAC |
| | CGCCCAGCGCGCGCTGGCTGTCGGCATCCTC |
| | AACCATGTTGTGGAAGTGGAAGAACTGGAAG |
| | ATTTCACCTTACAAATGGCGCACCACATCTC |
| | TGAGAAAGCGCCGTTAGCCATTGCCGTTATC |
| | AAAGAAGAGCTGCGTGTACTGGGCGAAGCA |
| | CACACCATGAACTCCGATGAATTTGAACGTA |
| | TTCAGGGGATGCGCCGCGCGGTGTATGACA |
| | GCGAAGATTACCAGGAAGGGATGAACGCTTT |
| | CCTCGAAAAACGTAAACCTAATTTCGTTGGT |
| | CATTAATCCCTGCGAACGAAGGAGTAAAAATG |
| | GAAACTCAGTGGACAAGGATGACCGCCAATG |
| | AAGCGGCAGAAATTATCCAGCATAACGACAT |
| | GGTGGCATTTAGCGGCTTTACCCCGGCGGGT |
| | TCGCCGAAAGCCCTACCCACCGCGATTGCCC |
| | GCAGAGCTAACGAACAGCATGAGGCCAAAA |
| | AGCCGTATCAAATTCGCCTTCTGACGGGTGC |
| | GTCAATCAGCGCCGCCGCTGACGATGTACTT |
| | TCTGACGCCGATGCTGTTTCCTGGCGTGCGC |
| | CATATCAAACATCGTCCGGTTTACGTAAAAA |
| | GATCAATCAGGGCGCGGTGAGTTTCGTTGAC |
| | CTGCATTTGAGCGAAGTGGCGCAAATGGTCA |
| | ATTACGGTTTCTTCGGCGACATTGATGTTGC |
| | CGTCATTGAAGCATCGGCACTGGCACCGGAT |
| | GGTCGAGTCTGGTTAACCAGCGGGATCGGTA |
| | ATGCGCCGACCTGGCTGCTGCGGGCGAAGA |
| | AAGTGATCATTGAACTCAATCACTATCACGA |
| | TCCGCGCGTTGCAGAACTGGCGGATATTGTG |
| | ATTCCTGGCGCGCCACCGCGGCGCAATAGC |
| | GTGTCGATCTTCCATGCAATGGATCGCGTCG |
| | GTACCCGCTATGTGCAAATCGATCCGAAAAA |
| | GATTGTCGCCGTCGTGGAAACCAACTTGCCC |
| | GACGCCGGTAATATGCTGGATAAGCAAAATC |
| | CCATGTGCCAGCAGATTGCCGATAACGTGGT |
| | CACGTTCTTATTGCAGGAAATGGCGCATGGG |
| | CGTATTCCGCCGGAATTTCTGCCGCTGCAAA |
| | GTGGCGTGGGCAATATCAATAATGCGGTAAT |
| | GGCGCGTCTGGGGGAAAACCCGGTAATTCCT |
| | CCGTTTATGATGTATTCGGAAGTGCTACAGG |
| | AATCGGTGGTGCATTTACTGGAAACCGGCAA |
| | AATCAGCGGGGCCAGCGCCTCCAGCCTGAC |
| | AATCTCGGCCGATTCCCTGCGCAAGATTTAC |
| | GACAATATGGATTACTTTGCCAGCCGCATTG |
| | TGTTGCGTCCGCAGGAGATTTCCAATAACCC |
| | GGAAATCATCCGTCGTCTGGGCGTCATCGCT |
| | CTGAACGTCGGCCTGGAGTTTGATATTTACG |
| | GGCATGCCAACTCAACACACGTAGCCGGGGT |
| | CGATCTGATGAACGGCATCGGCGGCAGCGG |
| | TGATTTTGAACGCAACGCGTATCTGTCGATC |
| | TTTATGGCCCCGTCGATTGCTAAAGAAGGCA |
| | AGATCTCAACCGTCGTGCCAATGTGCAGCCA |
| | TGTTGATCACAGCGAACACAGCGTCAAAGTG |
| | ATCATCACCGAACAAGGGATCGCCGATCTGC |
| | GCGGTCTTTCCCCGCTTCAACGCGCCCGCAC |
| | TATCATTGATAATTGTGCACATCCTATGTATC |
| | GGGATTATCTGCATCGCTATCTGGAAAATGC |
| | GCCTGGCGGACATATTCACCACGATCTTAGC |
| | CACGTCTTCGACTTACACCGTAATTTAATTG |
| | CAACCGGCTCGATGCTGGGTTAA |

[1373] Next, this strain was tested for propionate production.

[1374] Briefly, 3 ml LB (containing selective antibiotics (cam) where necessary was inoculated from frozen glycerol stocks with either wild type E. coli K12 or the genetically engineered bacteria comprising the chromosomal sleeping beauty mutase operon under the control of a FNR promoter. Bacteria were grown overnight at 37 C with shaking. Overnight cultures were diluted 1:100 into 10 ml LB in a 125 ml baffled flask. Cultures were grown aerobically at 37 C with shaking for about 1.5 h, and then transferred to the anaerobic chamber at 37 C for 4 h. Bacteria (2×10⁸ CFU) were added to 1 ml M9 media containing 50 mM MOPS with 0.5% glucose in microcentrifuge tubes. Cells were plated to determine cell counts. The assay tubes were placed in the anaerobic chamber at 37 C. At 1, 2, and 24 hours, 120 ul of cells were removed and pelleted at 14,000 rpm for 1 min, and 100 ul of the supernatant was transferred to a 96-well assay plate and sealed with aluminum foil, and stored at −80 C until analysis by LC-MS for propionate concentrations, as described in

[1375] Results are depicted in FIG. 29 and show that the genetically engineered strain produces ˜2.5 mM after 24 h, while very little or no propionate production was detected from the E. coli K12 wild type strain. Propionate was measured as described in Example 25.

### Example 23. Evaluation of the Sleeping Beauty Mutase Pathway for the Production of Propionate in E. coli Nissle

[1376] Next, the SBM pathway is evaluated for propionate production in E. coli Nissle. Nissle does not have the full 4-gene sleeping beauty mutase operon; it only has the first gene and a partial gene of the second, and genes 3 and 4 are missing. Therefore, recombineering is used to introduce this pathway into Nissle. The frt-cam-frt-PfnrS-sbm, ygfD, ygfG, ygfH construct is inserted at the location of the endogenous, truncated Nissle SBM. Next, the construct is transformed into E. coli Nissle and tested for propionate production essentially as described above.

### Example 24. Evaluation of the Acrylate Pathway from Clostridium propionicum for Propionate Production

[1377] The acrylate pathway from Clostridium propionicum is evaluated for adaptation to propionate production in E. coli. A construct (Ptet-pct-lcdABC-acrABC), codon optimized for E. coli, is synthesized by Genewiz and placed in a high copy plasmid (Logic51). Additionally, another construct is generated for side by side testing, in which the acrABC genes (which may be the rate limiting step of the pathway) are replaced with the acuI gene from Rhodobacter sphaeroides (Ptet-acuI-pct-lcdABC). Subsequently these constructs are transformed into BW25113 and are assessed for their ability to produce propionate, as compared to the type BW5113 strain as described above in Example 24. Propionate was measured as described in Example 27.

### of Exemplary Propionate Cassette Sequences

TABLE 59

| Description and SEQ ID NO | Sequence |
|---|---|
| Ptet-pct-lcdABC-acrABC; | ttaagacccactttcacatttaagttgatttctaatccgcatatgatcaattcaaggccgaataagaa |
| Ptet: lower case; tertR/tetA | ggctggctctgcaccttggtgatcaaataattcgatagcttgtcgtaataatggcggcatactatcag |
| promoter within Ptet: | tagtaggtgtuccattcactttagcgacttgatgctcttgatcttccaatacgcaacctaaagtaaaa |
| lower case bold, with tet | tgccccacagcgctgagtgcatataatgcattctctagtgaaaaaccttgttggcataaaaaggctaa |
| operator: lower case bold | ttgattttcgagagtttcatactgtttttctgtaggccgtgtacctaaatgtacttttgctccatcgc |
| underlined; ribosome | gatgacttagtaaagcacatctaaaacttttagcgttattacgtaaaaaatcttgccagattcccctt |
| binding site and leader: | ctaaagggcaaaagtgagtatggtgcctatctaacatctcaatggctaaggcgtcgagcaaagcccgc |
| lower case italic; ribosome | ttattttttacatgccaatacaatgtaggctgctctacacctagcttctgggcgagmacgggttgtta |
| binding sites: lower case | aaccttcgattccgacctcattaagcagctctaatgcgctgttaatcactttacttttatctaatcta |
| underlined; coding regions: | gacatcattaattcctaatttttgttgacactctatcattgatagagagttattttaccactccctat |
| upper case; (SEQ ID NO: 185) | cagtgatagagaaaagtgaactctagaaataattttgtttaactttaagaaggagatatacatATGCG |
| | CAAAGTGCCGATTATCACGGCTGACGAGGCCGCAAAACTGATCAAGGACGGCGACACCGTGACAACTA |
| | GCGGCTTTGTGGGTAACGCGATCCCTGAGGCCCTTGACCGTGCAGTCGAAAAGCGTTTCCTGGAAACG |
| | GGCGAACCGAAGAACATTACTTATGTATATTGCGGCAGTCAGGGCAATCGCGACGGTCGTGGCGCAGA |
| | ACATTTCGCGCATGAAGGCCTGCTGAAACGTTATATCGCTGGCCATTGGGCGACCGTCCCGGCGTTAG |
| | GGAAAATGGCCATGGAGAATAAAATGGAGGCCTACAATGTCTCTCAGGGCGCCTTGTGTCATCTCTTT |
| | CGCGATATTGCGAGCCATAAACCGGGTGTGTTCACGAAAGTAGGAATCGGCACCTTCATTGATCCACG |
| | TAACGGTGGTGGGAAGGTCAACGATATTACCAAGGAAGATATCGTAGAACTGGTGGAAATTAAAGGGC |
| | AGGAATACCTGTTTTATCCGGCGTTCCCGATCCATGTCGCGCTGATTCGTGGCACCTATGCGGACGAG |
| | AGTGGTAACATCACCTTTGAAAAAGAGGTAGCGCCTTTGGAAGGGACTTCTGTCTGTCAAGCGGTGAA |
| | GAACTCGGGTGGCATTGTCGTGGTTCAGGTTGAGCGTGTCGTCAAAGCAGGCACGCTGGATCCGCGCC |
| | ATGTGAAAGTTCCGGGTATCTATGTAGATTACGTAGTCGTCGCGGATCCGGAGGACCATCAACAGTCC |
| | CTTGACTGCGAATATGATCCTGCCCTTAGTGGAGAGCACCGTCGTCCGGAGGTGGTGGGTGAACCACT |
| | GCCTTTATCCGCGAAGAAAGTCATCGGCCGCCGTGGCGCGATTGAGCTCGAGAAAGACGTTGCAGTGA |
| | ACCTTGGGGTAGGTGCACCTGAGTATGTGGCCTCCGTGGCCGATGAAGAAGGCATTGTGGATTTTATG |
| | ACTCTCACAGCGGAGTCCGGCGCTATCGGTGGCGTTCCAGCCGGCGGTGTTCGCTTTGGGGCGAGCTA |
| | CAATGCTGACGCCTTGATCGACCAGGGCTACCAATTTGATTATTACGACGGTGGGGGTCTGGATCTTT |
| | GTTACCTGGGTTTAGCTGAATGCGACGAAAAGGGTAATATCAATGTTAGCCGCTTCGGTCCTCGTATC |
| | GCTGGGTGCGGCGGATTCATTAACATTACCCAAAACACGCCGAAAGTCTTCTTTTGTGGGACCTTTAC |
| | AGCCGGGGGGCTGAAAGTGAAAATTGAAGATGGTAAGGTGATTATCGTTCAGGAAGGGAAACAGAAGA |
| | AATTCCTTAAGGCAGTGGAGCAAATCACCTTTAATGGAGACGTGGCCTTAGCGAACAAGCAACAAGTT |
| | ACCTACATCACGGAGCGTTGCGTCTTCCTCCTCAAAGAAGACGGTTTACACCTTTCGGAAATCGCGCC |
| | AGGCATCGATCTGCAGACCCAGATTTTGGATGTTATGGACTTTGCCCCGATCATTGATCGTGACGCAA |
| | ACGGGCAGATTAAACTGATGGACGCGGCGTTATTCGCAGAAGGGCTGATGGGCTTGAAAGAAATGAAG |
| | TCTTGAtaagaaggagatatacatATGAGMAACCCAAGGCATGAAAGCTAAACAACTGTTAGCATACT |
| | TTCAGGGTAAAGCCGATCAGGATGCACGTGAAGCGAAAGCCCGCGGTGAGCTGGTCTGCTGGTCGGCG |
| | TCAGTCGCGCCGCCGGAATTTTGCGTAACAATGGGCATTGCCATGATCTACCCGGAGACTCATGCAGC |
| | GGGCATCGGTGCCCGCAAAGGTGCGATGGACATGCTGGAAGTTGCGGACCGCAAAGGCTACAACGTGG |
| | ATTGTTGTTCCTACGGCCGTGTAAATATGGGTTACATGGAATGTTTAAAAGAAGCCGCCATCACGGGC |
| | GTCAAGCCGGAAGTTTTGGTTAATTCCCCTGCTGCTGACGTTCCGCTTCCCGATTTGGTGATTACGTG |
| | TAATAATATCTGTAACACGCTGCTGAAATGGTACGAAAACTTAGCAGCAGAACTCGATATTCCTTGCA |
| | TCGTGATCGACGTACCGTTTAATCATACCATGCCGATTCCGGAATATGCCAAGGCCTACATCGCGGAC |
| | CAGTTCCGCAATGCAATTTCTCAGCTGGAAGTTATTTGTGGCCGTCCGTTCGATTGGAAGAAATTTAA |
| | GGAGGTCAAAGATCAGACCCAGCGTAGCGTATACCACTGGAACCGCATTGCCGAGATGGCGAAATACA |
| | AGCCTAGCCCGCTGAACGGCTTCGATCTGTTCAATTACATGGCGTTAATCGTGGCGTGCCGCAGCCTG |
| | GATTATGCAGAAATTACCTTTAAAGCGTTCGCGGACGAATTAGAAGAGAATTTGAAGGCGGGTATCTA |
| | CGCCTTTAAAGGTGCGGAAAAAACGCGCTTTCAATGGGAAGGTATCGCGGTGTGGCCACATTTAGGTC |
| | ACACGTTTAAATCTATGAAGAATCTGAATTCGATTATGACCGGTACGGCATACCCCGCCCTTTGGGAC |
| | CTGCACTATGACGCTAACGACGAATCTATGCACTCTATGGCTGAAGCGTACACCCGTATTTATATTAA |
| | TACTTGTCTGCAGAACAAAGTAGAGGTCCTGCTTGGGATCATGGAAAAAGGCCAGGTGGATGGTACCG |
| | TATATCATCTGAATCGCAGCTGCAAACTGATGAGTTTCCTGAACGTGGAAACGGCTGAAATTATTAAA |
| | GAGAAGAACGGTCTTCCTTACGTCTCCATTGATGGCGATCAGACCGATCCTCGCGTTTTTTCTCCGGC |
| | CCAGTTTGATACCCGTGTTCAGGCCCTGGTTGAGATGATGGAGGCCAATATGGCGGCAGCGGAATAAt |
| | aagaaggagatatacatATGTCACGCGTGGAGGCAATCCTGTCGCAGCTGAAAGATGTCGCCGCGAAT |
| | CCGAAAAAAGCCATGGATGACTATAAAGCTGAAACAGGTAAGGGCGCGGTTGGTATCATGCCGATCTA |
| | CAGCCCCGAAGAAATGGTACACGCCGCTGGCTATTTGCCGATGGGAATCTGGGGCGCCCAGGGCAAAA |
| | CGATTAGTAAAGCGCGCACCTATCTGCCTGCTTTTGCCTGCAGCGTAATGCAGCAGGTTATGGAATTA |
| | CAGTGCGAGGGCGCGTATGATGACCTGTCCGCAGTTATTTTTAGCGTACCGTGCGACACTCTCAAATG |
| | TCTTAGCCAGAAATGGAAAGGTACGTCCCCAGTGATTGTATTTACGCATCCGCAGAACCGCGGATTAG |
| | AAGCGGCGAACCAATTCTTGGTTACCGAGTATGAACTGGTAAAAGCACAACTGGAATCAGTTCTGGGT |
| | GTGAAAATTTCAAACGCCGCCCTGGAAAATTCGATTGCAATTTATAACGAGAATCGTGCCGTGATGCG |
| | TGAGTTCGTGAAAGTGGCAGCGGACTATCCTCAAGTCATTGACGCAGTGAGCCGCCACGCGGTTTTTA |
| | AAGCGCGCCAGTTTATGCTTAAGGAAAAACATACCGCACTTGTGAAAGAACTGATCGCTGAGATTAAA |
| | GCAACGCCAGTCCAGCCGTGGGACGGAAAAAAGGTTGTAGTGACGGGCATTCTGTTGGAACCGAATGA |
| | GTTATTAGATATCTTTAATGAGTTTAAGATCGCGATTGTTGATGATGATTTAGCGCAGGAAAGCCGTC |
| | AGATCCGTGTTGACGTTCTGGACGGAGAAGGCGGACCGCTCTACCGTATGGCTAAAGCGTGGCAGCAA |
| | ATGTATGGCTGCTCGCTGGCAACCGACACCAAGAAGGGTCGCGGCCCTATGTTAATTAACAAAACGAT |
| | TCAGACCGGTGCGGACGCTATCGTAGTTGCAATGATGAAGTITTGCGACCCAGAAGAATGGGATTATC |
| | CGGTAATGTACCGTGAATTTGAAGAAAAAGGGGTCAAATCACTTATGATTGAGGTGGATCAGGAAGTA |
| | TCGTCTTTCGAACAGATTAAAACCCGTCTGCAGTCATTCGTCGAAATGCTTTAAtaagaaggagatat |
| | acatATGTATACCTTGGGGATTGATGTCGGTTCTGCCTCTAGTAAAGCGGTGATTCTGAAAGATGGAA |
| | AAGATATTGTCGCTGCCGAGGTTGTCCAAGTCGGTACCGGCTCCTCGGGTCCCCAACGCGCACTGGAC |
| | AAAGCCTTTGAAGTCTCTGGCTTAAAAAAGGAAGACATCAGCTACACAGTAGCTACGGGCTATGGGCG |
| | CTTCAATTTTAGCGACGCGGATAAACAGATTTCGGAAATTAGCTGTCATGCCAAAGGCATTTATTTCT |
| | TAGTACCAACTGCGCGCACTATTATTGACATTGGCGGCCAAGATGCGAAAGCCATCCGCCTGGACGAC |
| | AAGGGGGGTATTAAGCAATTCTTCATGAATGATAAATGCGCGGCGGGCACGGGGCGTTTCCTGGAAGT |
| | CATGGCTCGCGTACTTGAAACCACCCTGGATGAAATGGCTGAACTGGATGAACAGGCGACTGACACCG |
| | CTCCCATTTCAAGCACCTGCACGGTTTTCGCCGAAAGCGAAGTAATTAGCCAATTGAGCAATGGTGTC |
| | TCACGCAACAACATCATTAAAGGTGTCCATCTGAGCGTTGCGTCACGTGCGTGTGGTCTGGCGTATCG |
| | CGGCGGTTTGGAGAAAGATGTTGTTATGACAGGTGGCGTGGCAAAAAATGCAGGGGTGGTGCGCGCGG |
| | TGGCGGGCGTTCTGAAGACCGATGTTATCGTTGCTCCGAATCCTCAGACGACCGGTGCACTGGGGGCA |
| | GCGCTGTATGCTTATGAGGCCGCCCAGAAGAAGTAAtaagaaggagatatacatATGGCCTTCAATAG |
| | CGCAGATATTAATTCTTTCCGCGATATTTGGTGTTTTGTGAACAGCGTGAGGGCAAACTGATTAACAC |
| | CGATTTCGAATTAATTAGCGAAGGTCGTAAACTGGCTGACGAACGCGGAAGCAAACTGGTTGGAATTT |
| | TGCTGGGGCACGAAGTTGAAGAAATCGCAAAAGAATTAGGCGGCTATGGTGCGGACAAGGTAATTGTG |
| | TGCGATCATCCGGAACTTAAATTTTACACTACGGATGCTTATGCCAAAGTTTTATGTGACGTCGTGAT |
| | GGAAGAGAAACCGGAGGTAATTTTGATCGGTGCCACCAACATTGGCCGTGATCTCGGACCGCGTTGTG |
| | CTGCACGCTTGCACACGGGGCTGACGGCTGATTGCACGCACCTGGATATTGATATGAATAAATATGTG |
| | GACTTTCTTAGCACCAGTAGCACCTTGGATATCTCGTCGATGACTTTCCCTATGGAAGATACAAACCT |
| | TAAAATGACGCGCCCTGCATTTGGCGGACATCTGATGGCAACGATCATTTGTCCACGCTTCCGTCCCT |
| | GTATGAGCACAGTGCGCCCCGGAGTGATGAAGAAAGCGGAGTTCTCGCAGGAGATGGCGCAAGCATGT |
| | CAAGTAGTGACCCGTCACGTAAATTTGTCGGATGAAGACCTTAAAACTAAAGTAATTAATATCGTGAA |
| | GGAAACGAAAAAGATTGTGGATCTGATCGGCGCAGAAATTATTGTGTCAGTTGGTCGTGGTATCTCGA |
| | AAGATGTCCAAGGTGGAATTGCACTGGCTGAAAAACTTGCGGACGCATTTGGTAACGGTGTCGTGGGC |
| | GGCTCGCGCGCAGTGATTGATTCCGGCTGGTTACCTGCGGATCATCAGGTTGGACAAACCGGTAAGAC |
| | CGTGCACCCGAAAGTCTACGTGGCGCTGGGTATTAGTGGGGCTATCCAGCATAAGGCTGGGATGCAAG |
| | ACTCTGAACTGATCATTGCCGTCAACAAAGACGAAACGGCGCCTATCTTCGACTGCGCCGATTATGGC |
| | ATCACCGGTGATTTATTTAAAATCGTACCGATGATGATCGACGCGATCAAAGAGGGTAAAAACGCATG |
| | AtaagaaggagatatacatATGCGCATCTATGTGTGTGTGAAACAAGTCCCAGATACGAGCGGCAAGG |
| | TGGCCGTTAACCCTGATGGGACCCTTAACCGTGCCTCAATGGCAGCGATTATTAACCCGGACGATATG |
| | TCCGCGATCGAACAGGCATTAAAACTGAAAGATGAAACCGGATGCCAGGTTACGGCGCTTACGATGGG |
| | TCCTCCTCCTGCCGAGGGCATGTTGCGCGAAATTATTGCAATGGGGGCCGACGATGGTGTGCTGATTT |
| | CGGCCCGTGAATTTGGGGGGTCCGATACCTTCGCAACCAGTCAAATTATTAGCGCGGCAATCCATAAA |
| | TTAGGCTTAAGCAATGAAGACATGATCTTTTGCGGTCGTCAGGCCATTGACGGTGATACGGCCCAAGT |
| | CGGCCCTCAAATTGCCGAAAAACTGAGCATCCCACAGGTAACCTATGGCGCAGGAATCAAAAAATCTG |
| | GTGATTTAGTGCTGGTGAAGCGTATGTTGGAGGATGGTTATATGATGATCGAAGTCGAAACTCCATGT |
| | CTGATTACCTGCATTCAGGATAAAGCGGTAAAACCACGTTACATGACTCTCAACGGTATTATGGAATG |
| | CTACTCCAAGCCGCTCCTCGTTCTCGATTACGAAGCACTGAAAGATGAACCGCTGATCGAACTTGATA |
| | CCATTGGGCTTAAAGGCTCCCCGACGAATATCTTTAAATCGTTTACGCCGCCTCAGAAAGGCGTTGGT |
| | GTCATGCTCCAAGGCACCGATAAGGAAAAAGTCGAGGATCTGGTGGATAAGCTGATGCAGAAACATGT |
| | CATCTAAtaagaaggagatatacatATGTTCTTACTGAAGATTAAAAAAGAACGTATGAAACGCATGG |
| | ACTTTAGTTTAACGCGTGAACAGGAGATGTTAAAAAAACTGGCGCGTCAGTTTGCTGAGATCGAGCTG |
| | GAACCGGTGGCCGAAGAGATTGATCGTGAGCACGTTTTTCCTGCAGAAAACTTTAAGAAGATGGCGGA |
| | AATTGGCTTAACCGGCATTGGTATCCCGAAAGAATTTGGTGGCTCCGGTGGAGGCACCCTGGAGAAGG |
| | TCATTGCCGTGTCAGAATTCGGCAAAAAGTGTATGGCCTCAGCTTCCATTTTAAGCATTCATCTTATC |
| | GCGCCGCAGGCAATCTACAAATATGGGACCAAAGAACAGAAAGAGACGTACCTGCCGCGTCTTACCAA |
| | AGGTGGTGAACTGGGCGCCTTTGCGCTGACAGAACCAAACGCCGGAAGCGATGCCGGCGCGGTAAAAA |
| | CGACCGCGATTCTGGACAGCCAGACAAACGAGTACGTGCTGAATGGCACCAAATGCTTTATCAGCGGG |
| | GGCGGGCGCGCGGGTGTTCTTGTAATTTTTGCGCTTACTGAACCGAAAAAAGGTCTGAAAGGGATGAG |
| | CGCGATTATCGTGGAGAAAGGGACCCCGGGCTTCAGCATCGGCAAGGTGGAGAGCAAGATGGGGATCG |
| | CAGGTTCGGAAACCGCGGAACTTATCTTCGAAGATTGTCGCGTTCCGGCTGCCAACCTTTTAGGTAAA |
| | GAAGGCAAAGGCTTTAAAATTGCTATGGAAGCCCTGGATGGCGCCCGTATTGGCGTGGGCGCTCAAGC |
| | AATCGGAATTGCCGAGGGGGCGATCGACCTGAGTGTGAAGTACGTTCACGAGCGCATTCAATTTGGTA |
| | AACCGATCGCGAATCTGCAGGGAATTCAATGGTATATCGCGGATATGGCGACCAAAACCGCCGCGGCA |
| | CGCGCACTTGTTGAGTTTGCAGCGTATCTTGAAGACGCGGGTAAACCGTTCACAAAGGAATCTGCTAT |
| | GTGCAAGCTGAACGCCTCCGAAAACGCGCGTTTTGTGACAAATTTAGCTCTGCAGATTCACGGGGGTT |
| | ACGGTTATATGAAAGATTATCCGTTAGAGCGTATGTATCGCGATGCTAAGATTACGGAAATTTACGAG |
| | GGGACATCAGAAATCCATAAGGTGGTGATTGCGCGTGAAGTAATGAAACGCTAA |
| pct-lcdABC-acrABC | ATGCGCAAAGTGCCGATTATCACGGCTGACGAGGCCGCAAAACTGATCAAGGACGGCGACACCGTGAC |
| (ribosome binding sites: | AACTAGCGGCTTTGTGGGTAACGCGATCCCTGAGGCCCTTGACCGTGCAGTCGAAAAGCGTTTCCTGG |
| lower case underlined; | AAACGGGCGAACCGAAGAACATTACTTATGTATATTGCGGCAGTCAGGGCAATCGCGACGGTCGTGGC |
| coding regions: upper case) | GCAGAACATTTCGCGCATGAAGGCCTGCTGAAACGTTATATCGCTGGCCATTGGGCGACCGTCCCGGC |
| (SEQ ID NO: 186) | GTTAGGGAAAATGGCCATGGAGAATAAAATGGAGGCCTACAATGTCTCTCAGGGCGCCTTGTGTCATC |
| | TCTTTCGCGATATTGCGAGCCATAAACCGGGTGTGTTCACGAAAGTAGGAATCGGCACCTTCATTGAT |
| | CCACGTAACGGTGGTGGGAAGGTCAACGATATTACCAAGGAAGATATCGTAGAACTGGTGGAAATTAA |
| | AGGGCAGGAATACCTGTTTTATCCGGCGTTCCCGATCCATGTCGCGCTGATTCGTGGCACCTATGCGG |
| | ACGAGAGTGGTAACATCACCTTTGAAAAAGAGGTAGCGCCTTTGGAAGGGACTTCTGTCTGTCAAGCG |
| | GTGAAGAACTCGGGIGGCATTGTCGTGGTTCAGGTTGAGCGTGTCGTCAAAGCAGGCACGCTGGATCC |
| | GCGCCATGTGAAAGTTCCGGGTATCTATGTAGATTACGTAGTCGTCGCGGATCCGGAGGACCATCAAC |
| | AGTCCCTTGACTGCGAATATGATCCTGCCCTTAGTGGAGAGCACCGTCGTCCGGAGGTGGTGGGTGAA |
| | CCACTGCCTTTATCCGCGAAGAAAGTCATCGGCCGCCGTGGCGCGATTGAGCTCGAGAAAGACGTTGC |
| | AGTGAACCTTGGGGTAGGTGCACCTGAGTATGTGGCCTCCGTGGCCGATGAAGAAGGCATTGTGGATT |
| | TTATGACTCTCACAGCGGAGTCCGGCGCTATCGGTGGCGTTCCAGCCGGCGGTGTTCGCTTTGGGGCG |
| | AGCTACAATGCTGACGCCTTGATCGACCAGGGCTACCAATTTGATTATTACGACGGTGGGGGTCTGGA |
| | TCTTTGTTACCTGGGTTTAGCTGAATGCGACGAAAAGGGTAATATCAATGTTAGCCGCTTCGGTCCTC |
| | GTATCGCTGGGTGCGGCGGATTCATTAACATTACCCAAAACACGCCGAAAGTCTTCTTTTGTGGGACC |
| | TTTACAGCCGGGGGGCTGAAAGTGAAAATTGAAGATGGTAAGGTGATTATCGTTCAGGAAGGGAAACA |
| | GAAGAAATTCCTTAAGGCAGTGGAGCAAATCACCTTTAATGGAGACGTGGCCTTAGCGAACAAGCAAC |
| | AAGTTACCTACATCACGGAGCGTTGCGTCTTCCTCCTCAAAGAAGACGGTTTACACCTTTCGGAAATC |
| | GCGCCAGGCATCGATCTGCAGACCCAGATTTTGGATGTTATGGACTTTGCCCCGATCATTGATCGTGA |
| | CGCAAACGGGCAGATTAAACTGATGGACGCGGCGTTATTCGCAGAAGGGCTGATGGGCTTGAAAGAAA |
| | TGAAGTCTTGAtaagaaggagatatacatATGAGCTTAACCCAAGGCATGAAAGCTAAACAACTGTTA |
| | GCATACTTTCAGGGTAAAGCCGATCAGGATGCACGTGAAGCGAAAGCCCGCGGTGAGCTGGTCTGCTG |
| | GTCGGCGTCAGTCGCGCCGCCGGAATTTTGCGTAACAATGGGCATTGCCATGATCTACCCGGAGACTC |
| | ATGCAGCGGGCATCGGTGCCCGCAAAGGTGCGATGGACATGCTGGAAGTTGCGGACCGCAAAGGCTAC |
| | AACGTGGATTGTTGTTCCTACGGCCGTGTAAATATGGGTTACATGGAATGTTTAAAAGAAGCCGCCAT |
| | CACGGGCGTCAAGCCGGAAGTTTTGGTTAATTCCCCTGCTGCTGACGTTCCGCTTCCCGATTTGGTGA |
| | TTACGTGTAATAATATCTGTAACACGCTGCTGAAATGGTACGAAAACTTAGCAGCAGAACTCGATATT |
| | CCTTGCATCGTGATCGACGTACCGTTTAATCATACCATGCCGATTCCGGAATATGCCAAGGCCTACAT |
| | CGCGGACCAGTTCCGCAATGCAATTTCTCAGCTGGAAGTTATTTGTGGCCGTCCGTTCGATTGGAAGA |
| | AATTTAAGGAGGTCAAAGATCAGACCCAGCGTAGCGTATACCACTGGAACCGCATTGCCGAGATGGCG |
| | AAATACAAGCCTAGCCCGCTGAACGGCTTCGATCTGTTCAATTACATGGCGTTAATCGTGGCGTGCCG |
| | CAGCCTGGATTATGCAGAAATTACCTTTAAAGCGTTCGCGGACGAATTAGAAGAGAATTTGAAGGCGG |
| | GTATCTACGCCTTTAAAGGTGCGGAAAAAACGCGCTTTCAATGGGAAGGTATCGCGGTGTGGCCACAT |
| | TTAGGTCACACGTTTAAATCTATGAAGAATCTGAATTCGATTATGACCGGTACGGCATACCCCGCCCT |
| | TTGGGACCTGCACTATGACGCTAACGACGAATCTATGCACTCTATGGCTGAAGCGTACACCCGTATTT |
| | ATATTAATACTTGTCTGCAGAACAAAGTAGAGGTCCTGCTTGGGATCATGGAAAAAGGCCAGGTGGAT |
| | GGTACCGTATATCATCTGAATCGCAGCTGCAAACTGATGAGTTTCCTGAACGTGGAAACGGCTGAAAT |
| | TATTAAAGAGAAGAACGGTCTTCCTTACGTCTCCATTGATGGCGATCAGACCGATCCTCGCGTTTTTT |
| | CTCCGGCCCAGTTTGATACCCGTGTTCAGGCCCTGGTTGAGATGATGGAGGCCAATATGGCGGCAGCG |
| | GAATAAtaagaaggagatatacatATGTCACGCGTGGAGGCAATCCTGTCGCAGCTGAAAGATGTCGC |
| | CGCGAATCCGAAAAAAGCCATGGATGACTATAAAGCTGAAACAGGTAAGGGCGCGGTTGGTATCATGC |
| | CGATCTACAGCCCCGAAGAAATGGTACACGCCGCTGGCTATTTGCCGATGGGAATCTGGGGCGCCCAG |
| | GGCAAAACGATTAGTAAAGCGCGCACCTATCTGCCTGCTTTTGCCTGCAGCGTAATGCAGCAGGTTAT |
| | GGAATTACAGTGCGAGGGCGCGTATGATGACCTGTCCGCAGTTATTTTTAGCGTACCGTGCGACACTC |
| | TCAAATGTCTTAGCCAGAAATGGAAAGGTACGTCCCCAGTGATTGTATTTACGCATCCGCAGAACCGC |
| | GGATTAGAAGCGGCGAACCAATTCTTGGTTACCGAGTATGAACTGGTAAAAGCACAACTGGAATCAGT |
| | TCTGGGTGTGAAAATTTCAAACGCCGCCCTGGAAAATTCGATTGCAATTTATAACGAGAATCGTGCCG |
| | TGATGCGTGAGTTCGTGAAAGTGGCAGCGGACTATCCTCAAGTCATTGACGCAGTGAGCCGCCACGCG |
| | GTTTTTAAAGCGCGCCAGTTTATGCTTAAGGAAAAACATACCGCACTTGTGAAAGAACTGATCGCTGA |
| | GATTAAAGCAACGCCAGTCCAGCCGTGGGACGGAAAAAAGGTTGTAGTGACGGGCATTCTGTTGGAAC |
| | CGAATGAGTTATTAGATATCTTTAATGAGTTTAAGATCGCGATTGTTGATGATGATTTAGCGCAGGAC |
| | AAGCCGTCAGATCCGTGTTGACGTTCTGGACGGAGAAGGCGGACCGCTCTACCGTATGGCTAAAGCGT |
| | GGCAGCAAATGTATGGCTGCTCGCTGGCAACCGACACCAAGAAGGGTCGCGGCCGTATGTTAATTAAC |
| | AAAACGATTCAGACCGGTGCGGACGCTATCGTAGTTGCAATGATGAAGTTTTGCGACCCAGAAGAATG |
| | GGATTATCCGGTAATGTACCGTGAATTTGAAGAAAAAGGGGTCAAATCACTTATGATTGAGGTGGATC |
| | AGGAAGTATCGTCTTTCGAACAGATTAAAACCCGTCTGCAGICATTCGTCGAAATGCTTTAAtaagaa |
| | ggagatatacatATGTATACCTTGGGGATTGATGTCGGTTCTGCCTCTAGTAAAGCGGTGATTCTGAA |
| | AGATGGAAAAGATATTGTCGCTGCCGAGGTTGTCCAAGTCGGTACCGGCTCCTCGGGTCCCCAACGCG |
| | CACTGGACAAAGCCTTTGAAGTCTCTGGCTTAAAAAAGGAAGACATCAGCTACACAGTAGCTACGGGC |
| | TATGGGCGCTTCAATTTTAGCGACGCGGATAAACAGATTTCGGAAATTAGCTGTCATGCCAAAGGCAT |
| | TTATTTCTTAGTACCAACTGCGCGCACTATTATTGACATTGGCGGCCAAGATGCGAAAGCCATCCGCC |
| | TGGACGACAAGGGGGGTATTAAGCAATTCTTCATGAATGATAAATGCGCGGCGGGCACGGGGCGTTTC |
| | CTGGAAGTCATGGCTCGCGTACTTGAAACCACCCTGGATGAAATGGCTGAACTGGATGAACAGGCGAC |
| | TGACACCGCTCCCATTTCAAGCACCTGCACGGTTTTCGCCGAAAGCGAAGTAATTAGCCAATTGAGCA |
| | ATGGTGTCTCACGCAACAACATCATTAAAGGTGTCCATCTGAGCGTTGCGTCACGTGCGTGTGGTCTG |
| | GCGTATCGCGGCGGTTTGGAGAAAGATGTTGTTATGACAGGTGGCGTGGCAAAAAATGCAGGGGTGGT |
| | GCGCGCGGTGGCGGGCGTTCTGAAGACCGATGTTATCGTTGCTCCGAATCCTCAGACGACCGGTGCAC |
| | TGGGGGCAGCGCTGTATGCTTATGAGGCCGCCCAGAAGAAGTAAtaagaaggagatatacatATGGCC |
| | TTCAATAGCGCAGATATTAATTCTTTCCGCGATATTTGGGTGTTTTGTGAACAGCGTGAGGGCAAACT |
| | GATTAACACCGATTTCGAATTAATTAGCGAAGGTCGTAAACTGGCTGACGAACGCGGAAGCAAACTGG |
| | TTGGAATTTTGCTGGGGCACGAAGTTGAAGAAATCGCAAAAGAATTAGGCGGCTATGGTGCGGACAAG |
| | GTAATTGTGTGCGATCATCCGGAACTTAAATTTTACACTACGGATGCTTATGCCAAAGTTTTATGTGA |
| | CGTCGTGATGGAAGAGAAACCGGAGGTAATTTTGATCGGTGCCACCAACATTGGCCGTGATCTCGGAC |
| | CGCGTTGTGCTGCACGCTTGCACACGGGGCTGACGGCTGATTGCACGCACCTGGATATTGATATGAAT |
| | AAATATGTGGACTTTCTTAGCACCAGTAGCACCTTGGATATCTCGTCGATGACTTTCCCTATGGAAGA |
| | TACAAACCTTAAAATGACGCGCCCTGCATTTGGCGGACATCTGATGGCAACGATCATTTGTCCACGCT |
| | TCCGTCCCTGTATGAGCACAGTGCGCCCCGGAGTGATGAAGAAAGCGGAGTTCTCGCAGGAGATGGCG |
| | CAAGCATGTCAAGTAGTGACCCGTCACGTAAATTTGTCGGATGAAGACCTTAAAACTAAAGTAATTAA |
| | TATCGTGAAGGAAACGAAAAAGATTGTGGATCTGATCGGCGCAGAAATTATTGTGTCAGTTGGTCGTG |
| | GTATCTCGAAAGATGTCCAAGGTGGAATTGCACTGGCTGAAAAACTTGCGGACGCATTTGGTAACGGT |
| | GTCGTGGGCGGCTCGCGCGCAGTGATTGATTCCGGCTGGTTACCTGCGGATCATCAGGTTGGACAAAC |
| | CGGTAAGACCGTGCACCCGAAAGTCTACGTGGCGCTGGGTATTAGTGGGGCTATCCAGCATAAGGCTG |
| | GGATGCAAGACTCTGAACTGATCATTGCCGTCAACAAAGACGAAACGGCGCCTATCTTCGACTGCGCC |
| | GATTATGGCATCACCGGTGATTTATTTAAAATCGTACCGATGATGATCGACGCGATCAAAGAGGGTAA |
| | AAACGCATGAtaagaaaggagatatacatATGCGCATCTATGTGTGTGTGAAACAAGTCCCAGATACG |
| | AGCGGCAAGGTGGCCGTTAACCCTGATGGGACCCTTAACCGTGCCTCAATGGCAGCGATTATTAACCC |
| | GGACGATATGTCCGCGATCGAACAGGCATTAAAACTGAAAGATGAAACCGGATGCCAGGTTACGGCGC |
| | TTACGATGGGTCCTCCTCCTGCCGAGGGCATGTTGCGCGAAATTATTGCAATGGGGGCCGACGATGGT |
| | GTGCTGATTTCGGCCCGTGAATTTGGGGGGTCCGATACCTTCGCAACCAGTCAAATTATTAGCGCGGC |
| | AATCCATAAATTAGGCTTAAGCAATGAAGACATGATCTTTTGCGGTCGTCAGGCCATTGACGGTGATA |
| | CGGCCCAAGTCGGCCCTCAAATTGCCGAAAAACTGAGCATCCCACAGGTAACCTATGGCGCAGGAATC |
| | AAAAAATCTGGTGATTTAGTGCTGGTGAAGCGTATGTTGGAGGATGGTTATATGATGATCGAAGTCGA |
| | AACTCCATGTCTGATTACCTGCATTCAGGATAAAGCGGTAAAACCACGTTACATGACTCTCAACGGTA |
| | TTATGGAATGCTACTCCAAGCCGCTCCTCGTTCTCGATTACGAAGCACTGAAAGATGAACCGCTGATC |
| | GAACTTGATACCATTGGGCTTAAAGGCTCCCCGACGAATATCTTTAAATCGTTTACGCCGCCTCAGAA |
| | AGGCGTTGGTGTCATGCTCCAAGGCACCGATAAGGAAAAAGTCGAGGATCTGGTGGATAAGCTGATGC |
| | AGAAACATGTCATCTAAtaagaaggagatatacatATGTTCTTACTGAAGATTAAAAAAGAACGTATG |
| | AAACGCATGGACTTTAGTTTAACGCGTGAACAGGAGATGTTAAAAAAACTGGCGCGTCAGTTTGCTGA |
| | GATCGAGCTGGAACCGGTGGCCGAAGAGATTGATCGTGAGCACGTTTTTCCTGCAGAAAACTTTAAGA |
| | AGATGGCGGAAATTGGCTTAACCGGCATTGGTATCCCGAAAGAATTTGGTGGCTCCGGTGGAGGCACC |
| | CTGGAGAAGGTCATTGCCGTGTCAGAATTCGGCAAAAAGTGTATGGCCTCAGCTTCCATTTTAAGCAT |
| | TCATCTTATCGCGCCGCAGGCAATCTACAAATATGGGACCAAAGAACAGAAAGAGACGTACCTGCCGC |
| | GTCTTACCAAAGGTGGTGAACTGGGCGCCTTTGCGCTGACAGAACCAAACGCCGGAAGCGATGCCGGC |
| | GCGGTAAAAACGACCGCGATTCTGGACAGCCAGACAAACGAGTACGTGCTGAATGGCACCAAATGCTT |
| | TATCAGCGGGGGCGGGCGCGCGGGTGTTCTTGTAATTTTTGCGCTTACTGAACCGAAAAAAGGTCTGA |
| | AAGGGATGAGCGCGATTATCGTGGAGAAAGGGACCCCGGGCTTCAGCATCGGCAAGGTGGAGAGCAAG |
| | ATGGGGATCGCAGGTTCGGAAACCGCGGAACTTATCTTCGAAGATTGTCGCGTTCCGGCTGCCAACCT |
| | TTTAGGTAAAGAAGGCAAAGGCTTTAAAATTGCTATGGAAGCCCTGGATGGCGCCCGTATTGGCGTGG |
| | GCGCTCAAGCAATCGGAATTGCCGAGGGGGCGATCGACCTGAGTGTGAAGTACGTTCACGAGCGCATT |
| | CAATTTGGTAAACCGATCGCGAATCTGCAGGGAATTCAATGGTATATCGCGGATATGGCGACCAAAAC |
| | CGCCGCGGCACGCGCACTTGTTGAGTTTGCAGCGTATCTTGAAGACGCGGGTAAACCGTTCACAAAGG |
| | AATCTGCTATGTGCAAGCTGAACGCCTCCGAAAACGCGCGTTTTGTGACAAATTTAGCTCTGCAGATT |
| | CACGGGGGTTACGGTTATATGAAAGATTATCCGTTAGAGCGTATGTATCGCGATGCTAAGATTACGGA |
| | AATTTACGAGGGGACATCAGAAATCCATAAGGTGGTGATTGCGCGTGAAGTAATGAAACGCTAA |
| Ptet-acuI-pct-lcdABC | caactgttgggaagggcgatcggtgcgggcctcttcgctattacgccagctggcgaaagggggatgtg |
| (Ptet: lower case; tetA/R | ctgcaaggcgattaagttgggtaacgccaggcttcccagtcacgacgttgtaaaacgacggccagtga |
| promoter within Ptet: | attgacgcgtattgggatgtaaaacgacggccagtgaattcgttaagacccactttcacatttaagtt |
| lower case bold, with tet | gtttttctaatccgcatatgatcaattcaaggccgaataagaaggctggctctgcaccttggtgatca |
| operator underlined; RBS | aataattcgatagcttgtcgtaataatggcggcatactatcagtagtaggtgtttccctttcttcttt |
| and leader region lower | agcgacttgatgctcttgatcttccaatacgcaacctaaagtaaaatgccccacagcgctgagtgcat |
| case italic; ribosome | ataatgcattctctagtgaaaaaccttgttggcataaaaaggctaattgattttcgagagtttcatac |
| binding site: lower case | tgtttttctgtaggccgtgtacctaaatgtacattgctccatcgcgatgacttagtaaagcacatcta |
| underlined italic; coding | aaactutagcgttattacgtaaaaaatcttgccagctttccccttctaaagggcaaaagtgagtatgg |
| region: upper case, rrnB T1 | tgcctatctaacatctcaatggctaaggcgtcgagcaaagcccgcttattttttacatgccaatacaa |
| and T2 terminors: lower | tgtaggctgctctacacctagcttctgggcgagtttacgggttgttaaaccttcgattccgacctcat |
| case bold underline italics) | taagcagctctaatgcgctgttaatcactttacttuatctaatctagacatcattaattcctaatttt |
| (SEQ ID NO: 187) | gttgacactctatcattgatagagttattttaccactccctatcagtgatagagaaaagtgaactcta |
| | gaaataattttgtttaactttaagaaggagatatacatATGCGTGCGGTACTGATCGAGAAGTCCGAT |
| | GATACACAGTCCGTCTCTGTCACCGAACTGGCTGAAGATCAACTGCCGGAAGGCGACGTTTTGGTAGA |
| | TGTTGCTTATTCAACACTGAACTACAAAGACGCCCTGGCAATTACCGGTAAAGCCCCCGTCGTTCGTC |
| | GTTTTCCGATGGTACCTGGAATCGACTTTACGGGTACCGTGGCCCAGTCTTCCCACGCCGACTTCAAG |
| | CCAGGTGATCGCGTAATCCTGAATGGTTGGGGTGTGGGGGAAAAACATTGGGGCGGTTTAGCGGAGCG |
| | CGCTCGCGTGCGCGGAGACTGGCTTGTTCCCTTGCCAGCCCCCCTGGACTTACGCCAAGCGGCCATGA |
| | TCGGTACAGCAGGATACACGGCGATGTTGTGCGTTCTGGCGCTTGAACGTCACGGAGTGGTGCCGGGT |
| | AATGGGGAAATCGTGGTGTCCGGTGCAGCAGGCGGCGTCGGCTCCGTTGCGACGACCCTTCTTGCCGC |
| | TAAGGGCTATGAGGTAGCGGCAGTGACTGGACGTGCGTCCGAAGCAGAATATCTGCGCGGTTTGGGGG |
| | CGGCGAGCGTAATTGATCGTAACGAATTAACGGGGAAGGTACGCCCGCTGGGTCAGGAGCGTTGGGCT |
| | GGCGGGATTGACGTGGCGGGATCAACCGTGCTTGCGAACATGCTTTCTATGATGAAGTATCGCGGGGT |
| | AGTCGCTGCGTGTGGCCTGGCCGCGGGCATGGATCTGCCCGCGTCTGTCGCGCCCTTTATTCTTCGTG |
| | GGATGACGCTGGCAGGGGTGGATAGCGTTATGTGCCCAAAGACAGATCGTTTAGCAGCGTGGGCCCGT |
| | TTGGCGTCAGATCTTGACCCTGCCAAGCTGGAGGAGATGACTACAGAGTTGCCGTTTAGTGAAGTAAT |
| | CGAGACAGCACCCAAATTCTTGGACGGGACGGTTCGTGGCCGCATTGTTATCCCCGTAACGCCCTAAg |
| | aactctagaaataattttgtttaactttaagaaggagatatacatATGCGCAAAGTGCCGATTATCAC |
| | GGCTGACGAGGCCGCAAAACTGATCAAGGACGGCGACACCGTGACAACTAGCGGCTTTGTGGGTAACG |
| | CGATCCCTGAGGCCCTTGACCGTGCAGTCGAAAAGCGTTTCCTGGAAACGGGCGAACCGAAGAACATT |
| | ACTTATGTATATTGCGGCAGTCAGGGCAATCGCGACGGTCGTGGCGCAGAACATTTCGCGCATGAAGG |
| | CCTGCTGAAACGTTATATCGCTGGCCATTGGGCGACCGTCCCGGCGTTAGGGAAAATGGCCATGGAGA |
| | ATAAAATGGAGGCCTACAATGTCTCTCAGGGCGCCTTGTGTCATCTCTTTCGCGATATTGCGAGCCAT |
| | AAACCGGGTGTGTTCACGAAAGTAGGAATCGGCACCTTCATTGATCCACGTAACGGTGGTGGGAAGGT |
| | CAACGATATTACCAAGGAAGATATCGTAGAACTGGTGGAAATTAAAGGGCAGGAATACCTGTTTTATC |
| | CGGCGTTCCCGATCCATGTCGCGCTGATTCGTGGCACCTATGCGGACGAGAGTGGTAACATCACCTTT |
| | GAAAAAGAGGTAGCGCCTTTGGAAGGGACTTCTGTCTGTCAAGCGGTGAAGAACTCGGGTGGCATTGT |
| | CGTGGTTCAGGTTGAGCGTGTCGTCAAAGCAGGCACGCTGGATCCGCGCCATGTGAAAGTTCCGGGTA |
| | TCTATGTAGATTACGTAGTCGTCGCGGATCCGGAGGACCATCAACAGTCCCTTGACTGCGAATATGAT |
| | CCTGCCCTTAGTGGAGAGCACCGTCGTCCGGAGGTGGTGGGTGAACCACTGCCTTTATCCGCGAAGAA |
| | AGTCATCGGCCGCCGTGGCGCGATTGAGCTCGAGAAAGACGTTGCAGTGAACCTTGGGGTAGGTGCAC |
| | CTGAGTATGTGGCCTCCGTGGCCGATGAAGAAGGCATTGTGGATTTTATGACTCTCACAGCGGAGTCC |
| | GGCGCTATCGGTGGCGTTCCAGCCGGCGGTGTTCGCTTTGGGGCGAGCTACAATGCTGACGCCTTGAT |
| | CGACCAGGGCTACCAATTTGATTATTACGACGGTGGGGGTCTGGATCTTTGTTACCTGGGTTTAGCTG |
| | AATGCGACGAAAAGGGTAATATCAATGTTAGCCGCTTCGGTCCTCGTATCGCTGGGTGCGGCGGATTC |
| | ATTAACATTACCCAAAACACGCCGAAAGTCTTCTTTTGTGGGACCTTTACAGCCGGGGGGCTGAAAGT |
| | GAAAATTGAAGATGGTAAGGTGATTATCGTTCAGGAAGGGAAACAGAAGAAATTCCTTAAGGCAGTGG |
| | AGCAAATCACCTTTAATGGAGACGTGGCCTTAGCGAACAAGCAACAAGTTACCTACATCACGGAGCGT |
| | TGCGTCTTCCTCCTCAAAGAAGACGGTTTACACCTTTCGGAAATCGCGCCAGGCATCGATCTGCAGAC |
| | CCAGATTTTGGATGTTATGGACTTTGCCCCGATCATTGATCGTGACGCAAACGGGCAGATTAAACTGA |
| | TGGACGCGGCGTTATTCGCAGAAGGGCTGATGGGCTTGAAAGAAATGAAGTCTTGAtaagaaggagat |
| | atacatATGAGCTTAACCCAAGGCATGAAAGCTAAACAACTGTTAGCATACTTTCAGGGTAAAGCCGA |
| | TCAGGATGCACGTGAAGCGAAAGCCCGCGGTGAGCTGGTCTGCTGGTCGGCGTCAGTCGCGCCGCCGG |
| | AATTTTGCGTAACAATGGGCATTGCCATGATCTACCCGGAGACTCATGCAGCGGGCATCGGTGCCCGC |
| | AAAGGTGCGATGGACATGCTGGAAGTTGCGGACCGCAAAGGCTACAACGTGGATTGTTGTTCCTACGG |
| | CCGTGTAAATATGGGTTACATGGAATGTTTAAAAGAAGCCGCCATCACGGGCGTCAAGCCGGAAGTTT |
| | TGGTTAATTCCCCTGCTGCTGACGTTCCGCTTCCCGATTTGGTGATTACGTGTAATAATATCTGTAAC |
| | ACGCTGCTGAAATGGTACGAAAACTTAGCAGCAGAACTCGATATTCCTTGCATCGTGATCGACGTACC |
| | GTTTAATCATACCATGCCGATTCCGGAATATGCCAAGGCCTACATCGCGGACCAGTTCCGCAATGCAA |
| | TTTCTCAGCTGGAAGTTATTTGTGGCCGTCCGTTCGATTGGAAGAAATTTAAGGAGGTCAAAGATCAG |
| | ACCCAGCGTAGCGTATACCACTGGAACCGCATTGCCGAGATGGCGAAATACAAGCCTAGCCCGCTGAA |
| | CGGCTTCGATCTGTTCAATTACATGGCGTTAATCGTGGCGTGCCGCAGCCTGGATTATGCAGAAATTA |
| | CCTTTAAAGCGTTCGCGGACGAATTAGAAGAGAATTTGAAGGCGGGTATCTACGCCTTTAAAGGTGCG |
| | GAAAAAACGCGCTTTCAATGGGAAGGTATCGCGGTGTGGCCACATTTAGGTCACACGTTTAAATCTAT |
| | GAAGAATCTGAATTCGATTATGACCGGTACGGCATACCCCGCCCTTTGGGACCTGCACTATGACGCTA |
| | ACGACGAATCTATGCACTCTATGGCTGAAGCGTACACCCGTATTTATATTAATACTTGTCTGCAGAAC |
| | AAAGTAGAGGTCCTGCTTGGGATCATGGAAAAAGGCCAGGTGGATGGTACCGTATATCATCTGAATCG |
| | CAGCTGCAAACTGATGAGTTTCCTGAACGTGGAAACGGCTGAAATTATTAAAGAGAAGAACGGTCTTC |
| | CTTACGTCTCCATTGATGGCGATCAGACCGATCCTCGCGTTTTTTCTCCGGCCCAGTTTGATACCCGT |
| | GTTCAGGCCCTGGTTGAGATGATGGAGGCCAATATGGCGGCAGCGGAATAAtaagaaggagatataca |
| | tATGTCACGCGTGGAGGCAATCCTGTCGCAGCTGAAAGATGTCGCCGCGAATCCGAAAAAAGCCATGG |
| | ATGACTATAAAGCTGAAACAGGTAAGGGCGCGGTTGGTATCATGCCGATCTACAGCCCCGAAGAAATG |
| | GTACACGCCGCTGGCTATTTGCCGATGGGAATCTGGGGCGCCCAGGGCAAAACGATTAGTAAAGCGCG |
| | CACCTATCTGCCTGCTTTTGCCTGCAGCGTAATGCAGCAGGTTATGGAATTACAGTGCGAGGGCGCGT |
| | ATGATGACCTGTCCGCAGTTATTTTTAGCGTACCGTGCGACACTCTCAAATGTCTTAGCCAGAAATGG |
| | AAAGGTACGTCCCCAGTGATTGTATTTACGCATCCGCAGAACCGCGGATTAGAAGCGGCGAACCAATT |
| | CTTGGTTACCGAGTATGAACTGGTAAAAGCACAACTGGAATCAGTTCTGGGTGTGAAAATTTCAAACG |
| | CCGCCCTGGAAAATTCGATTGCAATTTATAACGAGAATCGTGCCGTGATGCGTGAGTTCGTGAAAGTG |
| | GCAGCGGACTATCCTCAAGTCATTGACGCAGTGAGCCGCCACGCGGTTTTTAAAGCGCGCCAGTTTAT |
| | GCTTAAGGAAAAACATACCGCACTTGTGAAAGAACTGATCGCTGAGATTAAAGCAACGCCAGTCCAGC |
| | CGTGGGACGGAAAAAAGGTTGTAGTGACGGGCATTCTGTTGGAACCGAATGAGTTATTAGATATCTTT |
| | AATGAGTTTAAGATCGCGATTGTTGATGATGATTTAGCGCAGGAAAGCCGTCGGATCCGTGTTGACGT |
| | TCTGGACGGAGAAGGCGGACCGCTCTACCGTATGGCTAAAGCGTGGCAGCAAATGTATGGCTGCTCGC |
| | TGGCAACCGACACCAAGAAGGGTCGCGGCCGTATGTTAATTAACAAAACGATTCAGACCGGTGCGGAC |
| | GCTATCGTAGTTGCAATGATGAAGTTTTGCGACCCAGAAGAATGGGATTATCCGGTAATGTACCGTGA |
| | ATTTGAAGAAAAAGGGGTCAAATCACTTATGATTGAGGTGGATCAGGAAGTATCGTCTTTCGAACAGA |
| | TTAAAACCCGTCTGCAGTCATTCGTCGAAATGCTTTAAtaagaaggagatatacatATGTATACCTTG |
| | GGGATTGATGTCGGTTCTGCCTCTAGTAAAGCGGTGATTCTGAAAGATGGAAAAGATATTGTCGCTGC |
| | CGAGGTTGTCCAAGTCGGTACCGGCTCCTCGGGTCCCCAACGCGCACTGGACAAAGCCTTTGAAGTCT |
| | CTGGCTTAAAAAAGGAAGACATCAGCTACACAGTAGCTACGGGCTATGGGCGCTTCAATTTTAGCGAC |
| | GCGGATAAACAGATTTCGGAAATTAGCTGTCATGCCAAAGGCATTTATTTCTTAGTACCAACTGCGCG |
| | CACTATTATTGACATTGGCGGCCAAGATGCGAAAGCCATCCGCCTGGACGACAAGGGGGGTATTAAGC |
| | AATTCTTCATGAATGATAAATGCGCGGCGGGCACGGGGCGTTTCCTGGAAGTCATGGCTCGCGTACTT |
| | GAAACCACCCTGGATGAAATGGCTGAACTGGATGAACAGGCGACTGACACCGCTCCCATTTCAAGCAC |
| | CTGCACGGTTTTCGCCGAAAGCGAAGTAATTAGCCAATTGAGCAATGGTGTCTCACGCAACAACATCA |
| | TTAAAGGTGTCCATCTGAGCGTTGCGTCACGTGCGTGTGGTCTGGCGTATCGCGGCGGTTTGGAGAAA |
| | GATGTTGTTATGACAGGTGGCGTGGCAAAAAATGCAGGGGTGGTGCGCGCGGTGGCGGGCGTTCTGAA |
| | GACCGATGTTATCGTTGCTCCGAATCCTCAGACGACCGGTGCACTGGGGGCAGCGCTGTATGCTTATG |
| | AGGCCGCCCAGAAGAAGTAgatggtagtgtggggtctccccatgcgagagtagggaactgccaggcat |
| | [symbol] [symbol] [symbol] [symbol] [symbol] |
| | [symbol] ccgccgggagcggatttgaacgttgcgaagcaacggcccggagggtggcgggcaggacgc |
| | ccgccataaactgccaggcatcaaattaagc [symbol] [symbol] |
| acuI-pct-lcdABC | ATGCGTGCGGTACTGATCGAGAAGTCCGATGATACACAGTCCGTCTCTGTCACCGAACTGGCTGAAGA |
| (SEQ ID NO: 188) | TCAACTGCCGGAAGGCGACGTTTTGGTAGATGTTGCTTATTCAACACTGAACTACAAAGACGCCCTGG |
| | CAATTACCGGTAAAGCCCCCGTCGTTCGTCGTTTTCCGATGGTACCTGGAATCGACTTTACGGGTACC |
| | GTGGCCCAGTCTTCCCACGCCGACTTCAAGCCAGGTGATCGCGTAATCCTGAATGGTTGGGGTGTGGG |
| | GGAAAAACATTGGGGCGGTTTAGCGGAGCGCGCTCGCGTGCGCGGAGACTGGCTTGTTCCCTTGCCAG |
| | CCCCCCTGGACTTACGCCAAGCGGCCATGATCGGTACAGCAGGATACACGGCGATGTTGTGCGTTCTG |
| | GCGCTTGAACGTCACGGAGTGGTGCCGGGTAATGGGGAAATCGTGGTGTCCGGTGCAGCAGGCGGCGT |
| | CGGCTTCCGTTGCGACGACCCTTCTTGCCGCTAAGGGCTATGAGGTAGCGGCAGTGACTGGACGTGCG |
| | TCCGAAGCAGAATATCTGCGCGGTTTGGGGGCGGCGAGCGTAATTGATCGTAACGAATTAACGGGGAA |
| | GGTACGCCCGCTGGGTCAGGAGCGTTGGGCTGGCGGGATTGACGTGGCGGGATCAACCGTGCTTGCGA |
| | ACATGCTTTCTATGATGAAGTATCGCGGGGTAGTCGCTGCGTGTGGCCTGGCCGCGGGCATGGATCTG |
| | CCCGCGTCTGTCGCGCCCTTTATTCTTCGTGGGATGACGCTGGCAGGGGTGGATAGCGTTATGTGCCC |
| | AAAGACAGATCGTTTAGCAGCGTGGGCCCGTTTGGCGTCAGATCTTGACCCTGCCAAGCTGGAGGAGA |
| | TGACTACAGAGTTGCCGTTTAGTGAAGTAATCGAGACAGCACCCAAATTCTTGGACGGGACGGTTCGT |
| | GGCCGCATTGTTATCCCCGTAACGCCCTAAgaactctagaaataattttgtttaactttaagaaggag |
| | atatacatATGCGCAAAGTGCCGATTATCACGGCTGACGAGGCCGCAAAACTGATCAAGGACGGCGAC |
| | ACCGTGACAACTAGCGGCTTTGTGGGTAACGCGATCCCTGAGGCCCTTGACCGTGCAGTCGAAAAGCG |
| | ACCTGGAAACGGGCGAACCGAAGAACATTACTTATGTATATTGCGGCAGTCAGGGCAATCGCGACGGT |
| | CGTGGCGCAGAACATTTCGCGCATGAAGGCCTGCTGAAACGTTATATCGCTGGCCATTGGGCGACCGT |
| | CCCGGCGTTAGGGAAAATGGCCATGGAGAATAAAATGGAGGCCTACAATGTCTCTCAGGGCGCCTTGT |
| | GTCATCTCTTTCGCGATATTGCGAGCCATAAACCGGGTGTGTTCACGAAAGTAGGAATCGGCACCTTC |
| | ATTGATCCACGTAACGGTGGTGGGAAGGTCAACGATATTACCAAGGAAGATATCGTAGAACTGGTGGA |
| | AATTAAAGGGCAGGAATACCTGTTTTATCCGGCGTTCCCGATCCATGTCGCGCTGATTCGTGGCACCT |
| | ATGCGGACGAGAGTGGTAACATCACCTTTGAAAAAGAGGTAGCGCCTTTGGAAGGGACTTCTGTCTGT |
| | CAAGCGGTGAAGAACTCGGGTGGCATTGTCGTGGTTCAGGTTGAGCGTGTCGTCAAAGCAGGCACGCT |
| | GGATCCGCGCCATGTGAAAGTTCCGGGTATCTATGTAGATTACGTAGTCGTCGCGGATCCGGAGGACC |
| | ATCAACAGTCCCTTGACTGCGAATATGATCCTGCCCTTAGTGGAGAGCACCGTCGTCCGGAGGTGGTG |
| | GGTGAACCACTGCCTTTATCCGCGAAGAAAGTCATCGGCCGCCGTGGCGCGATTGAGCTCGAGAAAGA |
| | CGTTGCAGTGAACCTTGGGGTAGGTGCACCTGAGTATGTGGCCTCCGTGGCCGATGAAGAAGGCATTG |
| | TGGATTTTATGACTCTCACAGCGGAGTCCGGCGCTATCGGTGGCGTTCCAGCCGGCGGTGTTCGCTTT |
| | GGGGCGAGCTACAATGCTGACGCCTTGATCGACCAGGGCTACCAATTTGATTATTACGACGGTGGGGG |
| | TCTGGATCTTTGTTACCTGGGTTTAGCTGAATGCGACGAAAAGGGTAATATCAATGTTAGCCGCTTCG |
| | GTCCTCGTATCGCTGGGTGCGGCGGATTCATTAACATTACCCAAAACACGCCGAAAGTCTTCTTTTGT |
| | GGGACCTTTACAGCCGGGGGGCTGAAAGTGAAAATTGAAGATGGTAAGGTGATTATCGTTCAGGAAGG |
| | GAAACAGAAGAAATTCCTTAAGGCAGTGGAGCAAATCACCTTTAATGGAGACGTGGCCTTAGCGAACA |
| | AGCAACAAGTTACCTACATCACGGAGCGTTGCGICTTCCTCCTCAAAGAAGACGGTTTACACCTTTCG |
| | GAAATCGCGCCAGGCATCGATCTGCAGACCCAGATTTTGGATGTTATGGACTTTGCCCCGATCATTGA |
| | TCGTGACGCAAACGGGCAGATTAAACTGATGGACGCGGCGTTATTCGCAGAAGGGCTGATGGGCTTGA |
| | AAGAAATGAAGTCTTGAtaagaaggagatatacatATGAGCTTAACCCAAGGCATGAAAGCTAAACAA |
| | CTGTTAGCATACTTTCAGGGTAAAGCCGATCAGGATGCACGTGAAGCGAAAGCCCGCGGTGAGCTGGT |
| | CTGCTGGTCGGCGTCAGTCGCGCCGCCGGAATTTTGCGTAACAATGGGCATTGCCATGATCTACCCGG |
| | AGACTCATGCAGCGGGCATCGGTGCCCGCAAAGGTGCGATGGACATGCTGGAAGTTGCGGACCGCAAA |
| | GGCTACAACGTGGATTGTTGTTCCTACGGCCGTGTAAATATGGGTTACATGGAATGTTTAAAAGAAGC |
| | CGCCATCACGGGCGTCAAGCCGGAAGTTTTGGTTAATTCCCCTGCTGCTGACGTTCCGCTTCCCGATT |
| | TGGTGATTACGTGTAATAATATCTGTAACACGCTGCTGAAATGGTACGAAAACTTAGCAGCAGAACTC |
| | GATATTCCTTGCATCGTGATCGACGTACCGTTTAATCATACCATGCCGATTCCGGAATATGCCAAGGC |
| | CTACATCGCGGACCAGTTCCGCAATGCAATTTCTCAGCTGGAAGTTATTTGTGGCCGTCCGTTCGATT |
| | GGAAGAAATTTAAGGAGGTCAAAGATCAGACCCAGCGTAGCGTATACCACTGGAACCGCATTGCCGAG |
| | ATGGCGAAATACAAGCCTAGCCCGCTGAACGGCTTCGATCTGTTCAATTACATGGCGTTAATCGTGGC |
| | GTGCCGCAGCCTGGATTATGCAGAAATTACCTTTAAAGCGTTCGCGGACGAATTAGAAGAGAATTTGA |
| | AGGCGGGTATCTACGCCTTTAAAGGTGCGGAAAAAACGCGCTTTCAATGGGAAGGTATCGCGGTGTGG |
| | CCACATTTAGGTCACACGTTTAAATCTATGAAGAATCTGAATTCGAITATGACCGGTACGGCATACCC |
| | CGCCCTTTGGGACCTGCACTATGACGCTAACGACGAATCTATGCACTCTATGGCTGAAGCGTACACCC |
| | GTATTTATATTAATACTTGTCTGCAGAACAAAGTAGAGGTCCTGCTTGGGATCATGGAAAAAGGCCAG |
| | GTGGATGGTACCGTATATCATCTGAATCGCAGCTGCAAACTGATGAGTTTCCTGAACGTGGAAACGGC |
| | TGAAATTATTAAAGAGAAGAACGGTCTTCCTTACGTCTCCATTGATGGCGATCAGACCGATCCTCGCG |
| | TTMTCTCCGGCCCAGTTTGATACCCGTGTTCAGGCCCTGGTTGAGATGATGGAGGCCAATATGGCGGC |
| | AGCGGAATAAtaagaaggagatatacatATGTCACGCGTGGAGGCAATCCTGTCGCAGCTGAAAGATG |
| | TCGCCGCGAATCCGAAAAAAGCCATGGATGACTATAAAGCTGAAACAGGTAAGGGCGCGGTTGGTATC |
| | ATGCCGATCTACAGCCCCGAAGAAATGGTACACGCCGCTGGCTATTTGCCGATGGGAATCTGGGGCGC |
| | CCAGGGCAAAACGATTAGTAAAGCGCGCACCTATCTGCCTGCTTTTGCCTGCAGCGTAATGCAGCAGG |
| | TTATGGAATTACAGTGCGAGGGCGCGTATGATGACCTGTCCGCAGTTATTTTTAGCGTACCGTGCGAC |
| | ACTCTCAAATGTCTTAGCCAGAAATGGAAAGGTACGTCCCCAGTGATTGTATTTACGCATCCGCAGAA |
| | CCGCGGATTAGAAGCGGCGAACCAATTCTTGGTTACCGAGTATGAACTGGTAAAAGCACAACTGGAAT |
| | CAGTTCTGGGTGTGAAAATTTCAAACGCCGCCCTGGAAAATTCGATTGCAATTTATAACGAGAATCGT |
| | GCCGTGATGCGTGAGTTCGTGAAAGTGGCAGCGGACTATCCTCAAGTCATTGACGCAGTGAGCCGCCA |
| | CGCGGTTTTTAAAGCGCGCCAGTTTATGCTTAAGGAAAAACATACCGCACTTGTGAAAGAACTGATCG |
| | CTGAGATTAAAGCAACGCCAGTCCAGCCGTGGGACGGAAAAAAGGTTGTAGTGACGGGCATTCTGTTG |
| | GAACCGAATGAGTTATTAGATATCTTTAATGAGTTTAAGATCGCGATTGTTGATGATGATTTAGCGCA |
| | GGAAAGCCGTCGGATCCGTGTTGACGTTCTGGACGGAGAAGGCGGACCGCTCTACCGTATGGCTAAAG |
| | CGTGGCAGCAAATGTATGGCTGCTCGCTGGCAACCGACACCAAGAAGGGTCGCGGCCGTATGTTAATT |
| | AACAAAACGATTCAGACCGGTGCGGACGCTATCGTAGTTGCAATGATGAAGTTTTGCGACCCAGAAGA |
| | ATGGGATTATCCGGTAATGTACCGTGAATTTGAAGAAAAAGGGGTCAAATCACTTATGAITGAGGTGG |
| | ATCAGGAAGTATCGTCTTTCGAACAGATTAAAACCCGTCTGCAGICATTCGTCGAAATGCTTTAAtaa |
| | gaaggagatatacatATGTATACCTTGGGGATTGATGTCGGTTCTGCCTCTAGTAAAGCGGTGATTCT |
| | GAAAGATGGAAAAGATATTGTCGCTGCCGAGGTTGTCCAAGTCGGTACCGGCTCCTCGGGTCCCCAAC |
| | GCGCACTGGACAAAGCCTTTGAAGTCTCTGGCTTAAAAAAGGAAGACATCAGCTACACAGTAGCTACG |
| | GGCTATGGGCGCTTCAATTTTAGCGACGCGGATAAACAGATTTCGGAAATTAGCTGTCATGCCAAAGG |
| | CATTTATTTCTTAGTACCAACTGCGCGCACTATTATTGACATTGGCGGCCAAGATGCGAAAGCCATCC |
| | GCCTGGACGACAAGGGGGGTATTAAGCAATTCTTCATGAATGATAAATGCGCGGCGGGCACGGGGCGT |
| | TTCCTGGAAGTCATGGCTCGCGTACTTGAAACCACCCTGGATGAAATGGCTGAACTGGATGAACAGGC |
| | GACTGACACCGCTCCCATTTCAAGCACCTGCACGGTTTTCGCCGAAAGCGAAGTAATTAGCCAATTGA |
| | GCAATGGTGTCTCACGCAACAACATCATTAAAGGTGTCCATCTGAGCGTTGCGTCACGTGCGTGTGGT |
| | CTGGCGTATCGCGGCGGTTTGGAGAAAGATGTTGTTATGACAGGTGGCGTGGCAAAAAATGCAGGGGT |
| | GGTGCGCGCGGTGGCGGGCGTTCTGAAGACCGATGTTATCGTTGCTCCGAATCCTCAGACGACCGGTG |
| | CACTGGGGGCAGCGCTGTATGCTTATGAGGCCGCCCAGAAGAAGTA |

[1379] In some embodiments, genetically engineered bacteria comprise a nucleic acid sequence that is at least about 80%, at least about 85%, at least about 90%, at least about 95%, or at least about 99% homologous to the DNA sequence of SEQ ID NO: 185, 186, 187, or 188, or a functional fragment thereof.

### Example 25. Quantification of Propionate by LC-MS/MS

[1380] Sample Preparation

[1381] First, fresh 1000, 500, 250, 100, 20, 4 and 0.8 μg/mL sodium propionate standards were prepared in water. Then, 25 μL of sample (bacterial supernatants and standards) were pipetted into a V-bottom polypropylene 96-well plate, and 75 μL of 60% ACN (45 uL ACN+30 uL water per reaction) with 10 ug/mL of butyrate-d5 (CDN isotope) internal standard in final solution were added to each sample. The plate was heat-sealed, mixed well, and centrifuged at 4000 rpm for 5 minutes. In a round-bottom 96-well polypropylene plate, 5 μL of diluted samples were added to 95 μL of a buffer containing 10 mM MES pH4.5, 20 mM EDC (N-(3-Dimethylaminopropyl)-N′-ethylcarbodiimide), and 20 mM TFEA (2,2,2-trifluroethylamine). The plate was again heat-sealed and mixed well, and samples were incubated at room temperature for 1 hour

[1382] LC-MS/MS Method

[1383] Propionate was measured by liquid chromatography coupled to tandem mass spectrometry (LC-MS/MS) using a Thermo TSQ Quantum Max triple quadrupole mass spectrometer. HPLC Details are listed in Table 60 and Table 61. Tandem Mass Spectrometry details are found in Table 62.

TABLE 60
HPLC Details

| | |
|---|---|
| Column | Thermo Aquasil C18 column, 5 μm (50 × 2.1 mm) |
| Mobile Phase A | 100% H2O, 0.1% Formic Acid |
| Mobile Phase B | 100% ACN, 0.1% Formic Acid |
| Injection volume | 10 uL |

TABLE 61
HPLC Method

| Total Time (min) | Flow Rate (μL/min) | A % | B % |
|---|---|---|---|
| 0 | 0.5 | 100 | 0 |
| 1 | 0.5 | 100 | 0 |
| 2 | 0.5 | 10 | 90 |
| 4 | 0.5 | 10 | 90 |
| 4.01 | 0.5 | 100 | 0 |
| 4.25 | 0.5 | 100 | 0 |

TABLE 62
Tandem Mass Spectrometry Details

| | |
|---|---|
| Ion Source | HESI-II |
| Polarity | Positive |
| SRM | Propionate 156.2/57.1, |
| transitions | Propionate-d5 161/62.1 |

### Example 26. Generation of Constructs for Overproducing Therapeutic Molecules for Secretion

[1384] To produce strain capable of secreting anti-inflammatory or gut barrier enhancer polypeptides, e.g., GLP2, IL-22, IL-10 (viral or human), several constructs are designed employing different secretion strategies. The organization of exemplary constructs is shown in FIG. 30A, FIG. 30B, FIG. 30C, and FIG. 31A and FIG. 31B, FIG. 32A, FIG. 32B, FIG. 32C, FIG. 32D, FIG. 32E. Various GLP2, IL-22, IL-10 (viral or human) constructs are synthesized, and cloned into vector pBR322 for transformation of E. coli. In some embodiments, the constructs encoding the effector molecules are integrated into the genome. In some embodiments, the constructs encoding the effector molecules are on a plasmid, e.g., a medium copy plasmid. Table 63. lists exemplary polypeptide coding sequences used in the constructs.

TABLE 63
Polypeptide coding sequences

| Description | Sequence | SEQ ID NO |
|---|---|---|
| GLP2 | CATGCTGATGGTTCTTTCTCTGATGAGAT | SEQ ID NO: 189 |
| | GAACACCATTCTTGATAATCTTGCCGCCA | |
| | GGGACTTTATAAACTGGTTGATTCAGACC | |
| | AAAATCACTGAC | |
| GLP2 codon | CATGCTGACGGCTCTTTTTCTGACGAAAT | SEQ ID NO: 190 |
| optimized | GAATACCATCCTGGATAATCTGGCGGCG | |
| | CGTGATTTTATTAATTGGCTGATCCAAAC | |
| | TAAAATTACTGATTAA | |
| FliC20-GLP2 | ATGGCACAAGTCATTAATACCAACAGCC | SEQ ID NO: 191 |
| (FliC20, start of | TCTCGCTGATCACTCAAAATAATATCAAC | |
| FliC gene preceding | AAGCATGCTGACGGCTCTTTTTCTGACGA | |
| GLP2 sequence | AATGAATACCATCCTGGATAATCTGGCG | |
| underlined) | GCGCGTGATTTTATTAATTGGCTGATCCA | |
| | AACTAAAATTACTGATTAA | |
| GLP2 codon | ATGCATGCTGACGGCTCTTTTTCTGACGA | SEQ ID NO: 192 |
| optimized | AATGAATACCATCCTGGATAATCTGGCG | |
| (e.g., used in fliC | GCGCGTGATTTTATTAATTGGCTGATCCA | |
| construct) | AACTAAAATTACTGATTAA | |
| vIL10 codon | ATGGGTACTGACCAATGTGATAATTTCCC | SEQ ID NO: 193 |
| optimized | ACAAATGCTGCGTGATTTGCGCGACGCTT | |
| (e.g., used in fliC | TCTCGCGTGTGAAAACTTTTTTTCAGACT | |
| construct) | AAAGATGAGGTGGATAATCTGCTGCTGA | |
| | AAGAGAGCCTGTTGGAAGATTTTAAAGG | |
| | CTACTTGGGCTGTCAAGCGCTGTCGGAG | |
| | ATGATTCAATTTTATCTGGAAGAGGTGAT | |
| | GCCGCAAGCTGAGAACCAAGATCCGGAA | |
| | GCGAAAGATCACGTGAATTCGCTGGGCG | |
| | AGAATCTGAAAACTCTGCGTCTGCGTCTG | |
| | CGTCGTTGTCACCGTTTTTTGCCGTGCGA | |
| | AAACAAAAGTAAAGCTGTTGAGCAAATT | |
| | AAAAACGCTTTTAACAAACTGCAGGAAA | |
| | AAGGTATCTATAAAGCGATGAGCGAATT | |
| | TGATATTTTTATTAATTATATTGAAGCTT | |
| | ATATGACTATTAAAGCTCGCTAA | |
| vIL10 | GGTACAGACCAATGTGACAATTTTCCCCA | SEQ ID NO: 194 |
| | AATGTTGAGGGACCTAAGAGATGCCTTC | |
| | AGTCGTGTTAAAACCTTTTTCCAGACAAA | |
| | GGACGAGGTAGATAACCTTTTGCTCAAG | |
| | GAGTCTCTGCTAGAGGACTTTAAGGGCT | |
| | ACCTTGGATGCCAGGCCCTGTCAGAAAT | |
| | GATCCAATTCTACCTGGAGGAAGTCATG | |
| | CCACAGGCTGAAAACCAGGACCCTGAAG | |
| | AATCTAAAGACCCTACGGCTCCGCCTGC | |
| | GCCGTTGCCACAGGTTCCTGCCGTGTGAG | |
| | AACAAGAGTAAAGCTGTGGAACAGATAA | |
| | AAAATGCCTTTAACAAGCTGCAGGAAAA | |
| | AGGAATTTACAAAGCCATGAGTGAATTT | |
| | GACATTTTTATTAACTACATAGAAGCATA | |
| | CATGACAATTAAAGCCAGG | |
| IL-22 codon | GCACCGATCTCTTCCCACTGTCGCTTAGA | SEQ ID NO: 195 |
| optimized | TAAATCGAATTTTCAACAACCTTATATTA | |
| (e.g., use with | CGAATCGTACGTTTATGCTGGCTAAAGA | |
| diffusible | AGCGTCATTAGCTGATAACAACACTGAT | |
| outer membrane | GTTCGCCTGATTGGTGAGAAATTGTTTCA | |
| construct) | CGGTGTGTCTATGTCAGAACGTTGCTACC | |
| | TGATGAAACAAGTTCTGAATTTCACCCTG | |
| | GAAGAAGTGTTGTTTCCGCAATCTGACCG | |
| | CTTTCAACCGTATATGCAAGAGGTTGTGC | |
| | CGTTTCTGGCGCGCCTGAGTAATCGCCTG | |
| | AGCACTTGTCATATTGAGGGCGACGACC | |
| | TGCATATTCAACGAAATGTTCAAAAATTG | |
| | AAAGATACGGTGAAGAAACTGGGTGAAA | |
| | GTGGTGAAATCAAAGCGATTGGTGAGCT | |
| | GGATCTGCTGTTTATGTCATTGCGCAATG | |
| | CGTGCATTTAA | |
| IL-22 codon | ATGGCACCGATCTCTTCCCACTGTCGCTT | SEQ ID NO: 196 |
| optimized | AGATAAATCGAATTTTCAACAACCTTATA | |
| (e.g., used in fliC | TTACGAATCGTACGTTTATGCTGGCTAAA | |
| construct) | GAAGCGTCATTAGCTGATAACAACACTG | |
| | ATGTTCGCCTGATTGGTGAGAAATTGTTT | |
| | CACGGTGTGTCTATGTCAGAACGTTGCTA | |
| | CCTGATGAAACAAGTTCTGAATTTCACCC | |
| | TGGAAGAAGTGTTGTTTCCGCAATCTGAC | |
| | CGCTTTCAACCGTATATGCAAGAGGTTGT | |
| | GCCGTTTCTGGCGCGCCTGAGTAATCGCC | |
| | TGAGCACTTGTCATATTGAGGGCGACGA | |
| | CCTGCATATTCAACGAAATGTTCAAAAAT | |
| | TGAAAGATACGGTGAAGAAACTGGGTGA | |
| | AAGTGGTGAAATCAAAGCGATTGGTGAG | |
| | CTGGATCTGCTGTTTATGTCATTGCGCAA | |
| | TGCGTGCATTTAA | |
| hIL-10 codon | TCGCCAGGTCAAGGAACGCAGTCAGAGA | SEQ ID NO: 197 |
| optimized | ATTCATGCACTCACTTTCCGGGCAATCTG | |
| | CCGAATATGCTGCGCGATCTGCGAGATG | |
| | CATTCTCTCGCGTGAAAACGTTCTTTCAA | |
| | ATGAAAGATCAACTGGATAATCTGCTGC | |
| | TGAAGGAGTCGTTGTTGGAGGATTTTAA | |
| | GGGGTATCTGGGTTGTCAAGCACTGTCTG | |
| | AAATGATTCAATTTTACTTGGAGGAAGTT | |
| | ATGCCGCAAGCGGAAAACCAAGATCCGG | |
| | ATATTAAGGCGCACGTGAACTCACTGGG | |
| | CGAAAACCTGAAAACTTTGCGCCTGCGT | |
| | CTGAGACGATGTCACCGATTCCTGCCGTG | |
| | TGAAAACAAGTCAAAGGCGGTTGAGCAA | |
| | GTTAAGAATGCTTTCAATAAGCTGCAAG | |
| | AAAAGGGCATCTATAAAGCGATGTCTGA | |
| | ATTTGATATCTTTATAAACTACATAGAAG | |
| | CTTATATGACTATGAAGATTCGAAATTAA | |
| Monomerized hIL-10 | TCGCCAGGTCAAGGAACGCAGTCAGAGA | SEQ ID NO: 198 |
| (codon opt) | ATTCATGCACTCACTTTCCGGGCAATCTG | |
| | CCGAATATGCTGCGCGATCTGCGAGATG | |
| | CATTCTCTCGCGTGAAAACGTTCTTTCAA | |
| | ATGAAAGATCAACTGGATAATCTGCTGC | |
| | TGAAGGAGTCGTTGTTGGAGGATTTTAA | |
| | GGGGTATCTGGGTTGTCAAGCACTGTCTG | |
| | AAATGATTCAATTTTACTTGGAGGAAGTT | |
| | ATGCCGCAAGCGGAAAACCAAGATCCGG | |
| | ATATTAAGGCGCACGTGAACTCACTGGG | |
| | CGAAAACCTGAAAACTTTGCGCCTGCGT | |
| | CTGAGACGATGTCACCGATTCCTGCCGTG | |
| | TGAAAACGGAGGAGGAAGTGGTGGTAAG | |
| | TCAAAGGCGGTTGAGCAAGTTAAGAATG | |
| | CTTTCAATAAGCTGCAAGAAAAGGGCAT | |
| | CTATAAAGCGATGTCTGAATTTGATATCT | |
| | TTATAAACTACATAGAAGCTTATATGACT | |
| | ATGAAGATTCGAAATTAA | |

[1385] In some embodiments, genetically engineered bacteria comprise a nucleic acid sequence that is at least about 80%, at least about 85%, at least about 90%, at least about 95%, or at least about 99% homologous to the DNA sequence of SEQ ID NO: 189, SEQ ID NO: 190, SEQ ID NO: 191, SEQ ID NO: 192, SEQ ID NO: 193, SEQ ID NO: 194, SEQ ID NO: 195, SEQ ID NO: 196, SEQ ID NO: 197, or SEQ ID NO: 198 or a functional fragment thereof.

[1386] Table 64 lists exemplary secretion tags, which can be added at the N-terminus when the diffusible outer membrane (DOM) method or the fliC method is used.

TABLE 64
Secretion Tags and FliC components

| Sequence Name | Sequence | SEQ ID NO |
|---|---|---|
| fliC-FliC20 (e.g., used in GLP2 | tgacggcgattgagccgacgggtggaaaccc | SEQ ID NO: 199 |
| construct) | aaaacgtaatcaacGTGGGTACTCCTTAAAT | |
| FliC20: start of the fliC gene | TGGGTTCGAATGGACCatggcacaagtcatt | |
| which (in some constructs) | aataccaacagcctctcgcgatcactcaaaa | |
| precedes the effector polypeptide | taatatcaacaag | |
| sequence, see e.g., FIG 30B and | | |
| FIG. 30C shown in italics | | |
| fliC: native fliC UTR in bold, | | |
| optimized RBS underlined | | |
| fliC-RBS (e.g., used in IL22 | tgacggcgattgagccgacgggtggaaaccc | SEQ ID NO: 200 |
| construct) | aaaacgtaatcaactacgaacacttacagga | |
| fliC::native fliC UTR in bold, | ggtaccca | |
| optimized RBS underlined | | |
| fliC-RBS (e.g., used in GLP2 | tgacggcgattgagccgacgggtggaaaccc | |
| construct) | aaaacgtaatcaacaagtaaaactctgggag | |
| fliC: native fliC UTR in bold, | gttccta | |
| optimized RBS underlined | | |
| fliC-RBS (e.g., used in vIL10 | tgacggcgattgagccgacgggtggaaaccc | SEQ ID NO: 201 |
| construct) | aaaacgtaatcaactcaaatcccttaataag | |
| fliC: native fliC UTR in bold, | gaggtaaa | |
| optimized RBS underlined | | |
| RBS-phoA | Ctctagaaataattttgtttaactttaagaa | SEQ ID NO: 202 |
| RBS: underlined | ggagatatacatatgaaacaaagcactattg | |
| | cactggcactcttaccgttactgtttacccc | |
| | tgtgacaaaagcg | |
| phoA | atgaaacaaagcactattgcactggcactct | SEQ ID NO: 203 |
| | taccgttactgtttacccctgtgacaaaagc | |
| | g | |
| RBS-ompF | Ctctagaaataattttgtttaactttaagaa | SEQ ID NO: 204 |
| RBS: underlined | ggagatatacatatgatgaagcgcaatattc | |
| | tggcagtgatcgtccctgctctgttagtagc | |
| | aggtactgcaaacgct | |
| ompF | atgatgaagcgcaatattctggcagtgatcg | SEQ ID NO: 205 |
| | tccctgctctgttagtagcaggtactgcaaa | |
| | cgct | |
| RBS-cvaC | Ctctagaaataattttgtttaactttaagaa | SEQ ID NO: 206 |
| RBS: underlined | ggagatatacatATGAGAACTCTGACTCTAA | |
| | ATGAATTAGATTCTGTTTCTGGTGGT | |
| cvaC | ATGAGAACTCTGACTCTAAATGAATTAGATT | SEQ ID NO: 207 |
| | CTGTTTCTGGTGGT | |
| RBS-phoA (Opimized, e.g., used | GACGCCAGAGAGTTAAGGGGGTTAAATGAAA | SEQ ID NO: 208 |
| in IL10 construct) | CAATCGACCATCGCATTGGCGCTGCTTCCTC | |
| RBS: underlined | TATTGTTCACACCGGTGACAAAGGCA | |
| Optimized phoA | ATGAAACAATCGACCATCGCATTGGCGCTGC | SEQ ID NO: 209 |
| | TTCCTCTATTGTTCACACCGGTGACAAAGGC | |
| | A | |
| RBS-TorA | ctctagaaataattttgataactttaagaag | SEQ ID NO: 210 |
| | gagatatacatATGAACAATAACGATCTCTT | |
| RBS: underlined | TCAGGCATCACGTCGGCGTTTTCTGGCACAA | |
| | CTCGGCGGCTTAACCGTCGCCGGGATGCTGG | |
| | GGCCGTCATTGTTAACGCCGCGACGTGCGAC | |
| | TGCG | |
| TorA | ATGAACAATAACGATCTCTTTCAGGCATCAC | SEQ ID NO: 211 |
| | GTCGGCGTTTTCTGGCACAACTCGGCGGCTT | |
| | AACCGTCGCCGGGATGCTGGGGCCGTCATTG | |
| | TTAACGCCGCGACGTGCGACTGCG | |
| RBS-TorA alternate | CCCACATTCGAGGTACTAAatgaacaataac | SEQ ID NO: 212 |
| | gatctctttcaggcatcacgtcggcgttttc | |
| | tggcacaactcggcggcttaaccgtcgccgg | |
| | gatgctggggacgtcattgttaacgccgcgc | |
| | cgtgcgactgcggcgcaagcggcg | |
| TorA (alternate) | atgaacaataacgatctctttcaggcatcac | SEQ ID NO: 213 |
| | gtcggcgttttctggcacaactcggcggctt | |
| | aaccgtcgccgggatgctggggacgtcattg | |
| | ttaacgccgcgccgtgcgactgcggcgcaag | |
| RBS-fdnG | cggcgACCCTATTACACACCTAAGGAGGCCA | SEQ ID NO: 214 |
| | AATACatggacgtcagtcgcagacaattttt | |
| | taaaatctgcgcgggcggtatggcgggaaca | |
| | acagtagcagcattgggctttgccccgaagc | |
| | aagcactggct | |
| fdnG | atggacgtcagtcgcagacaattttttaaaa | SEQ ID NO: 215 |
| | cgcgggcggtatggcgggaacaacagtagca | |
| | tctgcattgggctttgccccgaagcaagcac | |
| | tggct | |
| RBS-dms | ATACGCAAAAAACATAATTTAAGAGAGGATA | SEQ ID NO: 216 |
| | AACatgaaaacgaaaatccctgatgcggtat | |
| | tggctgctgaggtgagtcgccgtggtttggt | |
| | aaaaacgacagcgatcggcggcctggcaatg | |
| | gccagcagcgcattaacattaccttttagtc | |
| | ggattgcgcacgct | |
| dmsA | atgaaaacgaaaatccctgatgcggtattgg | SEQ ID NO: 217 |
| | ctgctgaggtgagtcgccgtggtttggtaaa | |
| | aacgacagcgatcggcggcctggcaatggcc | |
| | agcagcgcattaacattaccttttagtcgga | |
| | ttgcgcacgct | |

[1387] In some embodiments, genetically engineered bacteria comprise a nucleic acid sequence that is at least about 80%, at least about 85%, at least about 90%, at least about 95%, or at least about 99% homologous to the DNA sequence of SEQ ID NO: 199, SEQ ID NO: 200, SEQ ID NO: 201, SEQ ID NO: 202, SEQ ID NO: 203, SEQ ID NO: 204, SEQ ID NO: 205, SEQ ID NO: 206, SEQ ID NO: 207, SEQ ID NO: 208, SEQ ID NO: 209, SEQ ID NO: 210, SEQ ID NO: 211, SEQ ID NO: 212, SEQ ID NO: 213, SEQ ID NO: 214, SEQ ID NO: 215, SEQ ID NO: 216, and SEQ ID NO: 217. Table 65 lists exemplary promoter sequences and miscellaneous construct sequences.

TABLE 65
Promoter Sequences and Miscellaneous Construct Sequences

| Description | Sequence | SEQ ID NO |
|---|---|---|
| TetR/TetA | gaattcgttaagacccactttcacatttaagttgtttactaatccgcat | SEQ ID |
| Promoter | atgatcaattcaaggccgaataagaaggctggctctgcaccttggtgat | NO: 218 |
| | caaataattcgatagcttgtcgtaataatggcggcatactatcagtagt | |
| | aggtgtttccctttcactttagcgacttgatgctcttgatcttccaata | |
| | cgcaacctaaagtaaaatgccccacagcgctgagtgcatataatgcatt | |
| | ctctagtgaaaaaccttgttggcataaaaaggctaattgattttcgaga | |
| | gtttcatactgtttttctgtaggccgtgtacctaaatgtacttttgctc | |
| | catcgcgatgacttagtaaagcacatctaaaacttttagcgttattacg | |
| | taaaaaatcttgccagctttccccttctaaagggcaaaagtgagtatgg | |
| | tgcctatctaacatctcaatggctaaggcgtcgagcaaagcccgcttat | |
| | tttttacatgccaatacaatgtaggctgctctacacctagcttctgggc | |
| | gagtttacgggttgttaaaccttcgattccgacctcattaagcagctct | |
| | aatgcgctgttaatcactttacttttatctaatctagacatcattaatt | |
| | cctaatttttgttgacactctatcattgatagagttattttaccactcc | |
| | ctatcagtgatagagaaaagtgaa | |
| fliC | agcgggaataaggggcagagaaaagagtatttcgtcgactaacaaaaaa | SEQ ID |
| Promoter | gtggctgtttgtaaaaaaattctaaaggttgttttacgacagacgataa | NO: 219 |
| | cagggt | |
| FnrS | ggtaccAGTTGTTCTTATTGGTGGTGTTGCTTTATGGTTGCATCGTAGT | SEQ ID |
| Promoter | AAATGGTIGTAACAAAAGCAATTTTTCCGGCTGTCTGTATACAAAAACG | NO: 220 |
| | CCGCAAAGTTTGAGCGAAGTCAATAAACTCTCTACCCATTCAGGGNCCA | |
| | ATATCTCTCTTggatcc | |
| DOM | cacatttccccgaaaagtgccgatggccccccgatggtagtgtggccca | SEQ ID |
| Construct | tgcgagagtagggaactgccaggcatcaaataaaacgaaaggctcagtc | NO: 221 |
| Terminator | gaaagactgggccatcgttttatctgttgtttgtcggtgaacgctctcc | |
| | tgagtaggacaaatccgccgggagcggatttgaacgttgcgaagcaacg | |
| | gcccggagggtggcgggcaggacgcccgccataaactgccaggcatcaa | |
| | attaagcagaaggccatcctgacggatggcctttttgcgtggccagtgc | |
| | caagcttgcatgcagattgcagcattacacgtcttgagcgattgtgtag | |
| | gctggagctgcttc | |
| FRT Site | gaagttcctatactttctagagaataggaacttcggaataggaacttc | SEQ ID |
| | | NO: 222 |
| Kanamycin | aagatcccctcacgctgccgcaagcactcagggcgcaagggctgctaaa | SEQ ID |
| Resistance | ggaagcggaacacgtagaaagccagtccgcagaaacggtgctgaccccg | NO: 223 |
| Cassette | gatgaatgtcagctactgggctatctggacaagggaaaacgcaagcgca | |
| (for | aagagaaagcaggtagcttgcagtgggcttacatggcgatagctagact | |
| integration | gggcggttttatggacagcaagcgaaccggaattgccagctggggcgcc | |
| in between | ctctggtaaggttgggaagccctgcaaagtaaactggatggctttcttg | |
| FRT sites) | ccgccaaggatctgatggcgcaggggatcaagatctgatcaagagacag | |
| | gatgaggatcgtttcgcatgattgaacaagatggattgcacgcaggttc | |
| | tccggccgcttgggtggagaggctattcggctatgactgggcacaacag | |
| | acaatcggctgctctgatgccgccgtgttccggctgtcagcgcaggggc | |
| | gcccggttctttttgtcaagaccgacctgtccggtgccctgaatgaact | |
| | gcaggacgaggcagcgcggctatcgtggctggccacgacgggcgttcct | |
| | tgcgcagctgtgctcgacgttgtcactgaagcgggaagggactggctgc | |
| | tattgggcgaagtgccggggcaggatctcctgtcatctcaccttgctcc | |
| | tgccgagaaagtatccatcatggctgatgcaatgcggcggctgcatacg | |
| | cttgatccggctacctgcccattcgaccaccaagcgaaacatcgcatcg | |
| | agcgagcacgtactcggatggaagccggtcttgtcgatcaggatgatct | |
| | ggacgaagagcatcaggggctcgcgccagccgaactgttcgccaggctc | |
| | aaggcgcgcatgcccgacggcgaggatctcgtcgtgacccatggcgatg | |
| | cctgcttgccgaatatcatggtggaaaatggccgcttttctggattcat | |
| | cgactgtggccggctgggtgtggcggaccgctatcaggacatagcgttg | |
| | gctacccgtgatattgctgaagagcttggcggcgaatgggctgaccgct | |
| | tcctcgtgctttacggtatcgccgctcccgattcgcagcgcatcgcctt | |
| | ctatcgccttcttgacgagttcttctgagcgggactctggggttcgaaa | |
| | tgaccgaccaagcgacgcccaacctgccatcacgagatttcgattccac | |
| | cgccgccttctatgaaaggttgggcttcggaatcgttttccgggacgcc | |
| | ggctggatgatcctccagcgcggggatctcatgctggagttcttcgccc | |
| | accccagcttcaaaagcgctct | |

[1388] In some embodiments, genetically engineered bacteria comprise a nucleic acid sequence that is at least about 80%, at least about 85%, at least about 90%, at least about 95%, or at least about 99% homologous to the DNA sequence of SEQ ID NO: 218, SEQ ID NO: 219, SEQ ID NO: 220, SEQ ID NO: 221, SEQ ID NO: 222, and SEQ ID NO: 223. Table 66 Lists exemplary secretion constructs.

TABLE 66
Non-limiting Examples of Secretion Constructs

| Description | Sequence | SEQ ID NO: |
|---|---|---|
| FliC20-glp2; a human | cgttccttgtagggcgtcatagcgttcgacggcattaagtaacccaatgcc | SEQ ID NO: |
| GLP2 construct | gcccgcctgtagcagatcgtcaagttccacgctcgcgggcagtcgaacct | 224 |
| inserted into the FliC | gcaggcgcaatgcttcgtgacgcaccagcgggacataacgctgccacag | |
| locus, under the | cgagtgtttatccattacaccttcagcggtatagagtgaattcacgataaaca | |
| control of the native | gccctgcgttatatgagttatcggcatgattatccgtttctgcagggtttttaat | |
| FliC promoter (as | cggacgattagtgggtgaaatgaggggttatttgggggttaccggtaaatt | |
| shown in FIG. 32A) | gcgggcagaaaaaaccccgccgttggcggggaagcacgttgctggcaa | |
| | attaccattcatgttgccggatgcggcgtaaacgccttatccggcctacaaa | |
| | aatgtgcaaattcaataaattgcaattccccttgtaggcctgataagcgcag | |
| | cgcatcaggcaatttggcgttgccgtcagtctcagttaatcaggttacggcg | |
| | attaatcagtaattttagtttggatcagccaattaataaaatcacgcgccgcc | |
| | agattatccaggatggtattcatttcgtcagaaaaagagccgtcagcATG | |
| | cattaggaacctcccagagtttatacttgttgattacgttttgggtttccaccc | |
| | gtcggctcaatcgccgtcaaccctgttatcgtctgtcgtaaaacaacctttag | |
| | aatttttttcacaaacagccattttttgttagtcgacgaaatactcttttctctgc | |
| | cccttattcccgctattaaaaaaaacaattaaacgtaaactttgcgcaattca | |
| | ggccgataaccccggtattcgttttacgtgtcgaaagataaaCGAAGT | |
| | TCCTATACTTTCTAGAGAATAGGAACTTCGG | |
| | AATAGGAACTTCATTTctcgttcgctgccacctaagaatact | |
| | ctacggtcacatacAAATGGCGCGCCTTACGCCCCGC | |
| | CCTGCCACTCATCGCAGTACTGTTGTATTCAT | |
| | TAAGCATCTGCCGACATGGAAGCCATCACAA | |
| | ACGGCATGATGAACCTGAATCGCCAGCGGCA | |
| | TCAGCACCTTGTCGCCTTGCGTATAATATTTG | |
| | CCCATGGTGAAAACGGGGGCGAAGAAGTTGT | |
| | CCATATTGGCCACGTTTAAATCAAAACTGGT | |
| | GAAACTCACCCAGGGATTGGCTGAGACGAAA | |
| | AACATATTCTCAATAAACCCTTTAGGGAAAT | |
| | AGGCCAGGTTTTCACCGTAACACGCCACATC | |
| | TTGCGAATATATGTGTAGAAACTGCCGGAAA | |
| | TCGTCGTGGTATTCACTCCAGAGCGATGAAA | |
| | ACGTTTCAGTTTGCTCATGGAAAACGGTGTA | |
| | ACAAGGGTGAACACTATCCCATATCACCAGC | |
| | TCACCGTCTTTCATTGCCATACGTAATTCCGG | |
| | ATGAGCATTCATCAGGCGGGCAAGAATGTGA | |
| | ATAAAGGCCGGATAAAACTTGTGCTTATTTTT | |
| | CTTTACGGTCTTTAAAAAGGCCGTAATATCC | |
| | AGCTGAACGGTCTGGTTATAGGTACATTGAG | |
| | CAACTGACTGAAATGCCTCAAAATGTTCTTT | |
| | ACGATGCCATTGGGATATATCAACGGTGGTA | |
| | TATCCAGTGATTTTTTTCTCCATTTTAGCTTCC | |
| | TTAGCTCCTGAAAATCTCGACAACTCAAAAA | |
| | ATACGCCCGGTAGTGATCTTATTTCATTATGG | |
| | TGAAAGTTGGAACCTCTTACGTGCCGATCAA | |
| | CGTCTCATTTTCGCCAAAAGTTGGCCCAGGG | |
| | CTTCCCGGTATCAACAGGGACACCAGGATTT | |
| | ATTTATTCTGCGAAGTGATCTTCCGTCACAGG | |
| | TAGGCGCGCCGAAGTTCCTATACTTTCTAGA | |
| | GAATAGGAACTTCGGAATAGGAACTctcaccgcc | |
| | gcgcaaaaagcgacgctaacccctatttcaaatcagcaatcgtcgtttacc | |
| | gctaaacttagcgcctacggtacgctgaaaagcgcgctgacgactttcca | |
| | gaccgccaatactgcattgtctaaagccgatcttttttccgctaccagcacc | |
| | accagcagcaccaccgcgttcagtgccaccaccgcgggtaatgccatcg | |
| | ccgggaaatacaccatcagcgtcacccatctggcgcaggcgcaaaccct | |
| | gacaacgcgcaccaccagagacgatacgaaaacggcgatcgccacca | |
| | gcgacagcaaactcaccattcaacaaggcggcgacaaagatccgatttcc | |
| | attgatatcagcgcggctaactcgtctttaagcgggatccgtgatgccatca | |
| | acaacgcaaaagcaggcgtaagcgcaagcatcattaacgtgggtaacgg | |
| | tgaatatcgtctgtcagtcacatcaaatgacaccggcct | |
| FliC20 with optimized | attaatcagtaattttagtttggatcagccaattaataaaatcacgcgccgcc | SEQ ID NO: |
| RBS-GLP2 and UTR- | agattatccaggatggtattcatttcgtcagaaaaagagccgtcagcATG | 225 |
| FliC (as shown in FIG. | cattaggaacctcccagagtttatacttgttgattacgttttgggtttccaccc | |
| 32A, in reverse | gtcggctcaatcgccgtca | |
| orientation) | | |
| human GLP2 | cgttccttgtagggcgtcatagcgttcgacggcattaagtaacccaatgcc | SEQ ID NO: |
| construct, , including | gcccgcctgtagcagatcgtcaagttccacgctcgcgggcagtcgaacct | 226 |
| the N terminal 20 | gcaggcgcaatgcttcgtgacgcaccagcgggacataacgctgccacag | |
| amino acids of FliC | cgagtgtttatccattacaccttcagcggtatagagtgaattcacgataaaca | |
| (reverse orientation), | gccctgcgttatatgagttatcggcatgattatccgtttctgcagggtttttaat | |
| inserted into the FliC | cggacgattagtgggtgaaatgaggggttatttgggggttaccggtaaatt | |
| locus under the control | gcgggcagaaaaaaccccgccgttggcggggaagcacgttgctggcaa | |
| of a tet inducible | attaccattcatgttgccggatgcggcgtaaacgccttatccggcctacaaa | |
| promoter, with TetR | aatgtgcaaattcaataaattgcaattccccttgtaggcctgataagcgcag | |
| and chloramphenicol | cgcatcaggcaatttggcgttgccgtcagtctcagttaatcaggttacggcg | |
| resistance. | attaatcagtaattttagtttggatcagccaattaataaaatcacgcgccgcc | |
| (as shown in FIG. | agattatccaggatggtattcatttcgtcagaaaaagagccgtcagcATG | |
| 32C) | cttgttgatattattttgagtgatcagcgagaggctgttggtattaatgacttgt | |
| | gccatGGTCCATTCGAACCCAATTTAAGGAGTA | |
| | CCCACgttgattacgattttgggtttccacccgtcggctcaatcgccgtca | |
| | ttctctatcactgatagggagtggtaaaataactctatcaatgatagagtgtc | |
| | aacaaaaattaggaattaatgatgtctagattagataaaagtaaagtgattaa | |
| | cagcgcattagagctgcttaatgaggtcggaatcgaaggtttaacaacccg | |
| | taaactcgcccagaagctaggtgtagagcagcctacattgtattggcatgt | |
| | aaaaaataagcgggctttgctcgacgccttagccattgagatgttagatag | |
| | gcaccatactcacttttgccctttagaaggggaaagctggcaagattttttac | |
| | gtaataacgctaaaagttttagatgtgctttactaagtcatcgcgatggagca | |
| | aaagtacatttaggtacacggcctacagaaaaacagtatgaaactctcgaa | |
| | aatcaattagcctttttatgccaacaaggtttttcactagagaatgcattatatg | |
| | cactcagcgctgtggggcattttactttaggttgcgtattggaagatcaaga | |
| | gcatcaagtcgctaaagaagaaagggaaacacctactactgatagtatgc | |
| | cgccattattacgacaagctatcgaattatttgatcaccaaggtgcagagcc | |
| | agccttcttattcggccttgaattgatcatatgcggattagaaaaacaactta | |
| | aatgtgaaagtgggtcttaagaatttttttcacaaacagccattttttgttagtc | |
| | gacgaaatactcttttctctgccccttattcccgctattaaaaaaaacaattaa | |
| | acgtaaactttgcgcaattcaggccgataaccccggtattcgttttacgtgtc | |
| | gaaagataaaCGAAGTTCCTATACTTTCTAGAGAA | |
| | TAGGAACTTCGGAATAGGAACTTCATTTctcgtt | |
| | cgctgccacctaagaatactctacggtcacatacAAATGGCGCG | |
| | CCTTACGCCCCGCCCTGCCACTCATCGCAGTA | |
| | CTGTTGTATTCATTAAGCATCTGCCGACATGG | |
| | AAGCCATCACAAACGGCATGATGAACCTGAA | |
| | TCGCCAGCGGCATCAGCACCTTGTCGCCTTG | |
| | CGTATAATATTTGCCCATGGTGAAAACGGGG | |
| | GCGAAGAAGTTGTCCATATTGGCCACGTTTA | |
| | AATCAAAACTGGTGAAACTCACCCAGGGATT | |
| | GGCTGAGACGAAAAACATATTCTCAATAAAC | |
| | CCTTTAGGGAAATAGGCCAGGTTTTCACCGT | |
| | AACACGCCACATCTTGCGAATATATGTGTAG | |
| | AAACTGCCGGAAATCGTCGTGGTATTCACTC | |
| | CAGAGCGATGAAAACGTTTCAGTTTGCTCAT | |
| | GGAAAACGGTGTAACAAGGGTGAACACTATC | |
| | CCATATCACCAGCTCACCGTCTTTCATTGCCA | |
| | TACGTAATTCCGGATGAGCATTCATCAGGCG | |
| | GGCAAGAATGTGAATAAAGGCCGGATAAAA | |
| | CTTGTGCTTATTTTTCTTTACGGTCTTTAAAA | |
| | AGGCCGTAATATCCAGCTGAACGGTCTGGTT | |
| | ATAGGTACATTGAGCAACTGACTGAAATGCC | |
| | TCAAAATGTTCTTTACGATGCCATTGGGATAT | |
| | ATCAACGGTGGTATATCCAGTGATTTTTTTCT | |
| | CCATTTTAGCTTCCTTAGCTCCTGAAAATCTC | |
| | GACAACTCAAAAAATACGCCCGGTAGTGATC | |
| | TTATTTCATTATGGTGAAAGTTGGAACCTCTT | |
| | ACGTGCCGATCAACGTCTCATTTTCGCCAAA | |
| | AGTTGGCCCAGGGCTTCCCGGTATCAACAGG | |
| | GACACCAGGATTTATTTATTCTGCGAAGTGA | |
| | TCTTCCGTCACAGGTAGGCGCGCCGAAGTTC | |
| | CTATACTTTCTAGAGAATAGGAACTTCGGAA | |
| | TAGGAACTctcaccgccgcgcaaaaagcgacgctaacccctattt | |
| | caaatcagcaatcgtcgtttaccgctaaacttagcgcctacggtacgctga | |
| | aaagcgcgctgacgactttccagaccgccaatactgcattgtctaaagccg | |
| | atcttttttccgctaccagcaccaccagcagcaccaccgcgttcagtgcca | |
| | ccaccgcgggtaatgccatcgccgggaaatacaccatcagcgtcaccca | |
| | tctggcgcaggcgcaaaccctgacaacgcgcaccaccagagacgatac | |
| | gaaaacggcgatcgccaccagcgacagcaaactcaccattcaacaagg | |
| | cggcgacaaagatccgatttccattgatatcagcgcggctaactcgtcttta | |
| | agcgggatccgtgatgccatcaacaacgcaaaagcaggcgtaagcgca | |
| | agcatcattaacgtgggtaacggtgaatatcgtctgtcagtcacatcaaatg | |
| | acaccggcct | |
| human GLP2 | ttaatcagtaattttagtttggatcagccaattaataaaatcacgcgccgcca | SEQ ID NO: |
| construct, , including | gattatccaggatggtattcatttcgtcagaaaaagagccgtcagcATGc | 227 |
| the N terminal 20 | ttgttgatattattttgagtgatcagcgagaggctgttggtattaatgacttgtg | |
| amino acids of FliC | ccat | |
| (reverse orientation) | | |
| human GLP2 | ttaagacccactttcacatttaagttgatttctaatccgcatatgatcaattcaa | SEQ ID NO: |
| construct with a N | ggccgaataagaaggctggctctgcaccttggtgatcaaataattcgatag | 228 |
| terminal OmpF | cttgtcgtaataatggcggcatactatcagtagtaggtgtttccctttcttcttt | |
| secretion tag (sec- | agcgacttgatgctcttgatcttccaatacgcaacctaaagtaaaatgcccc | |
| dependent secretion | acagcgctgagtgcatataatgcattctctagtgaaaaaccttgttggcata | |
| system) under the | aaaaggctaattgattttcgagagtttcatactgtttttctgtaggccgtgtacc | |
| control of a tet | taaatgtacttttgctccatcgcgatgacttagtaaagcacatctaaaactttt | |
| inducible promoter, | agcgttattacgtaaaaaatcttgccagctttccccttctaaagggcaaaagt | |
| includes TetR in | gagtatggtgcctatctaacatctcaatggctaaggcgtcgagcaaagccc | |
| reverse direction | gcttattttttacatgccaatacaatgtaggctgctctacacctagcttctggg | |
| (as shown in FIG. | cgagtttacgggttgttaaaccttcgattccgacctcattaagcagctctaat | |
| 32C) | gcgctgttaatcactttacttttatctaatctagacatcattaattcctaatttttgt | |
| | tgacactctatcattgatagagttattttaccactccctatcagtgatagagaa | |
| | aagtgaactctagaaataattttgtttaactttaagaaggagatatacatatga | |
| | tgaagcgcaatattctggcagtgatcgtccctgctctgttagtagcaggtac | |
| | tgcaaacgctcatgctgatggttctttctctgatgagatgaacaccattcttga | |
| | taatcttgccgccagggactttataaactggttgattcagaccaaaatcactg | |
| | acaggtgacacatttccccgaaaagtgccgatggccccccgatggtagtg | |
| | tggccccatgcgagagtagggaactgccaggcatcaaataaaacgaaag | |
| | gctcagtcgaaagactgggcctttcgttttatctgttgtttgtcggtgaacgct | |
| | ctcctgagtaggacaaatccgccgggagcggatttgaacgttgcgaagca | |
| | acggcccggagggtggcgggcaggacgcccgccataaactgccaggc | |
| | atcaaattaagcagaaggccatcctgacggatggcctttttgcgtggccag | |
| | tgccaagcttgcatgcagattgcagcattacacgtcttgagcgattgtgtag | |
| | gctggagctgcttcgaagttcctatactttctagagaataggaacttcggaat | |
| | aggaacttc | |
| human GLP2 | atgatgaagcgcaatattctggcagtgatcgtccctgctctgttagtagcag | SEQ ID NO: |
| construct with a N | gtactgcaaacgctcatgctgatggttctttctctgatgagatgaacaccatt | 229 |
| terminal OmpF | cttgataatcttgccgccagggactttataaactggttgattcagaccaaaat | |
| secretion tag (sec- | cactgacaggtga | |
| dependent secretion | | |
| system) (as shown in | | |
| FIG. 32C) | | |
| human GLP2 | taagacccactttcacatttaagttgtttttctaatccgcatatgatcaattcaa | SEQ ID NO: |
| construct with a N | ggccgaataagaaggctggctctgcaccttggtgatcaaataattcgatag | 230 |
| terminal TorA | cttgtcgtaataatggcggcatactatcagtagtaggtgtttccctttcttcttt | |
| secretion tag (tat | agcgacttgatgctcttgatcttccaatacgcaacctaaagtaaaatgcccc | |
| secretion system) | acagcgctgagtgcatataatgcattctctagtgaaaaaccttgttggcata | |
| under the control of a | aaaaggctaattgattttcgagagtttcatactgtttttctgtaggccgtgtacc | |
| tet inducible promoter | taaatgtacttttgctccatcgcgatgacttagtaaagcacatctaaaactttt | |
| (as shown in FIG. | agcgttattacgtaaaaaatcttgccagctttccccttctaaagggcaaaagt | |
| 32E) | gagtatggtgcctatctaacatctcaatggctaaggcgtcgagcaaagccc | |
| | gcttattttttacatgccaatacaatgtaggctgctctacacctagcttctggg | |
| | cgagtttacgggttgttaaaccttcgattccgacctcattaagcagctctaat | |
| | gcgctgttaatcactttacttttatctaatctagacatcattaattcctaatttttgt | |
| | tgacactctatcattgatagagttattttaccactccctatcagtgatagagaa | |
| | aagtgaactctagaaataattttgtttaactttaagaaggagatatacatAT | |
| | GAACAATAACGATCTCTTTCAGGCATCACGT | |
| | CGGCGTTTTCTGGCACAACTCGGCGGCTTAA | |
| | CCGTCGCCGGGATGCTGGGGCCGTCATTGTT | |
| | AACGCCGCGACGTGCGACTGCGcatgctgatggttctt | |
| | tctctgatgagatgaacaccattcttgataatcttgccgccagggactttata | |
| | aactggttgattcagaccaaaatcactgactaataacacatttccccgaaaa | |
| | gtgccgatggccccccgatggtagtgtggcccatgcgagagtagggaac | |
| | tgccaggcatcaaataaaacgaaaggctcagtcgaaagactgggcctttc | |
| | gttttatctgttgtttgtcggtgaacgctctcctgagtaggacaaatccgccg | |
| | ggagcggatttgaacgttgcgaagcaacggcccggagggtggcgggca | |
| | ggacgcccgccataaactgccaggcatcaaattaagcagaaggccatcc | |
| | tgacggatggcctttttgcgtggccagtgccaagcttgcatgcagattgca | |
| | gcattacacgtcttgagcgattgtgtaggctggagctgcttcgaagttcctat | |
| | actttctagagaataggaacttcggaataggaacttc | |
| GLP-2 with TORA tag | ATGAACAATAACGATCTCTTTCAGGCATCAC | SEQ ID NO: |
| | GTCGGCGTTTTCTGGCACAACTCGGCGGCTT | 231 |
| | AACCGTCGCCGGGATGCTGGGGCCGTCATTG | |
| | TTAACGCCGCGACGTGCGACTGCGcatgctgatggt | |
| | tctttctctgatgagatgaacaccattcttgataatcttgccgccagggacttt | |
| | ataaactggttgattcagaccaaaatcactgac | |

[1389] In some embodiments, genetically engineered bacteria comprise a nucleic acid sequence that is at least about 80%, at least about 85%, at least about 90%, at least about 95%, or at least about 99% homologous to the DNA sequence of SEQ ID NO: 224, SEQ ID NO: 225, SEQ ID NO: 226, SEQ ID NO: 227, SEQ ID NO: 228, SEQ ID NO: 229, SEQ ID NO: 230, and SEQ ID NO: 231. Table 67 lists exemplary secretion constructs.

TABLE 67
Non-limiting Examples of Secretion Constructs

| Description | Sequences | SEQ ID NO |
|---|---|---|
| Ptet-phoA-hIL10 | gaattcgttaagacccactttcacatttaagttgtttttctaatccgcatat | SEQ ID NO: |
| | gatcaattcaaggccgaataagaaggctggctctgcaccttggtgatca | 232 |
| | aataattcgatagcttgtcgtaataatggcggcatactatcagtagtagg | |
| | tgtttccctttcttctttagcgacttgatgctcttgatcttccaatacgcaac | |
| | ctaaagtaaaatgccccacagcgctgagtgcatataatgcattctctagt | |
| | gaaaaaccttgttggcataaaaaggctaattgattttcgagagtttcata | |
| | ctgtttttctgtaggccgtgtacctaaatgtacttttgctccatcgcgatga | |
| | cttagtaaagcacatctaaaacttttagcgttattacgtaaaaaatcttgc | |
| | cagctttccccttctaaagggcaaaagtgagtatggtgcctatctaacatc | |
| | tcaatggctaaggcgtcgagcaaagcccgcttattttttacatgccaatac | |
| | aatgtaggctgctctacacctagcttctgggcgagtttacgggttgttaaa | |
| | ccttcgattccgacctcattaagcagctctaatgcgctgttaatcactttac | |
| | ttttatctaatctagacatcattaattcctaatttttgttgacactctatcatt | |
| | gatagagttattttaccactccctatcagtgatagagaaaagtgaa | |
| | GACGCCAGAGAGTTAAGGGGGTTAAATGAA | |
| | ACAATCGACCATCGCATTGGCGCTGCTTCCTC | |
| | TATTGTTCACACCGGTGACAAAGGCA | |
| | TCGCCAGGTCAAGGAACGCAGTCAGAGAATT | |
| | CATGCACTCACTTTCCGGGCAATCTGCCGAA | |
| | TATGCTGCGCGATCTGCGAGATGCATTCTCTC | |
| | GCGTGAAAACGTTCTTTCAAATGAAAGATCA | |
| | ACTGGATAATCTGCTGCTGAAGGAGTCGTTG | |
| | TTGGAGGATTTTAAGGGGTATCTGGGTTGTC | |
| | AAGCACTGTCTGAAATGATTCAATTTTACTTG | |
| | GAGGAAGTTATGCCGCAAGCGGAAAACCAA | |
| | GATCCGGATATTAAGGCGCACGTGAACTCAC | |
| | TGGGCGAAAACCTGAAAACTTTGCGCCTGCG | |
| | TCTGAGACGATGTCACCGATTCCTGCCGTGT | |
| | GAAAACAAGTCAAAGGCGGTTGAGCAAGTT | |
| | AAGAATGCTTTCAATAAGCTGCAAGAAAAGG | |
| | GCATCTATAAAGCGATGTCTGAATTTGATAT | |
| | CTTTATAAACTACATAGAAGCTTATATGACT | |
| | ATGAAGATTCGAAATTAA | |
| phoA-hIL10 | GACGCCAGAGAGTTAAGGGGGTTAAATGAA | SEQ ID NO: |
| | ACAATCGACCATCGCATTGGCGCTGCTTCCTC | 233 |
| | TATTGTTCACACCGGTGACAAAGGCA | |
| | TCGCCAGGTCAAGGAACGCAGTCAGAGAATT | |
| | CATGCACTCACTTTCCGGGCAATCTGCCGAA | |
| | TATGCTGCGCGATCTGCGAGATGCATTCTCTC | |
| | GCGTGAAAACGTTCTTTCAAATGAAAGATCA | |
| | ACTGGATAATCTGCTGCTGAAGGAGTCGTTG | |
| | TTGGAGGATTTTAAGGGGTATCTGGGTTGTC | |
| | AAGCACTGTCTGAAATGATTCAATTTTACTTG | |
| | GAGGAAGTTATGCCGCAAGCGGAAAACCAA | |
| | GATCCGGATATTAAGGCGCACGTGAACTCAC | |
| | TGGGCGAAAACCTGAAAACTTTGCGCCTGCG | |
| | TCTGAGACGATGTCACCGATTCCTGCCGTGT | |
| | GAAAACAAGTCAAAGGCGGTTGAGCAAGTT | |
| | AAGAATGCTTTCAATAAGCTGCAAGAAAAGG | |
| | GCATCTATAAAGCGATGTCTGAATTTGATAT | |
| | CTTTATAAACTACATAGAAGCTTATATGACT | |
| | ATGAAGATTCGAAATTAA | |
| fliC UTR-RBS - | tgacggcgattgagccgacgggtggaaacccaaaacgtaatcaact | SEQ ID NO: |
| pvIL10 | caaatcccttaataaggaggtaaaATGGGTACTGACCAA | 2334 |
| | TGTGATAATTTCCCACAAATGCTGCGTGATTT | |
| | GCGCGACGCTTTCTCGCGTGTGAAAACTTTTT | |
| | TTCAGACTAAAGATGAGGTGGATAATCTGCT | |
| | GCTGAAAGAGAGCCTGTTGGAAGATTTTAAA | |
| | GGCTACTTGGGCTGTCAAGCGCTGTCGGAGA | |
| | TGATTCAATTTTATCTGGAAGAGGTGATGCC | |
| | GCAAGCTGAGAACCAAGATCCGGAAGCGAA | |
| | AGATCACGTGAATTCGCTGGGCGAGAATCTG | |
| | AAAACTCTGCGTCTGCGTCTGCGTCGTTGTCA | |
| | CCGTTTTTTGCCGTGCGAAAACAAAAGTAAA | |
| | GCTGTTGAGCAAATTAAAAACGCTTTTAACA | |
| | AACTGCAGGAAAAAGGTATCTATAAAGCGAT | |
| | GAGCGAATTTGATATTTTTATTAATTATATTG | |
| | AAGCTTATATGACTATTAAAGCTCGCTAA | |
| Ptet-phoA-vIL10 | Gaattcgttaagacccactttcacatttaagttgtttttctaatccgcatat | SEQ ID NO: |
| | gatcaattcaaggccgaataagaaggctggctctgcaccttggtgatca | 235 |
| | aataattcgatagcttgtcgtaataatggcggcatactatcagtagtagg | |
| | tgtttccctttcttctttagcgacttgatgctcttgatcttccaatacgcaac | |
| | ctaaagtaaaatgccccacagcgctgagtgcatataatgcattctctagt | |
| | gaaaaaccttgttggcataaaaaggctaattgattttcgagagtttcata | |
| | ctgtttttctgtaggccgtgtacctaaatgtacttttgctccatcgcgatga | |
| | cttagtaaagcacatctaaaacttttagcgttattacgtaaaaaatcttgc | |
| | cagctttccccttctaaagggcaaaagtgagtatggtgcctatctaacatc | |
| | tcaatggctaaggcgtcgagcaaagcccgcttattttttacatgccaatac | |
| | aatgtaggctgctctacacctagcttctgggcgagtttacgggttgttaaa | |
| | ccttcgattccgacctcattaagcagctctaatgcgctgttaatcactttac | |
| | ttttatctaatctagacatcattaattcctaatttttgttgacactctatcatt | |
| | gatagagttattttaccactccctatcagtgatagagaaaagtgaa | |
| | GACGCCAGAGAGTTAAGGGGGTTAAATGAA | |
| | ACAATCGACCATCGCATTGGCGCTGCTTCCTC | |
| | TATTGTTCACACCGGTGACAAAGGCA | |
| | GGTACAGACCAATGTGACAATTTTCCCCAAA | |
| | TGTTGAGGGACCTAAGAGATGCCTTCAGTCG | |
| | TGTTAAAACCTTTTTCCAGACAAAGGACGAG | |
| | GTAGATAACCTTTTGCTCAAGGAGTCTCTGCT | |
| | AGAGGACTTTAAGGGCTACCTTGGATGCCAG | |
| | GCCCTGTCAGAAATGATCCAATTCTACCTGG | |
| | AGGAAGTCATGCCACAGGCTGAAAACCAGG | |
| | ACCCTGAAGCCAAAGACCATGTCAATTCTTT | |
| | GGGTGAAAATCTAAAGACCCTACGGCTCCGC | |
| | CTGCGCCGTTGCCACAGGTTCCTGCCGTGTG | |
| | AGAACAAGAGTAAAGCTGTGGAACAGATAA | |
| | AAAATGCCTTTAACAAGCTGCAGGAAAAAGG | |
| | AATTTACAAAGCCATGAGTGAATTTGACATT | |
| | TTTATTAACTACATAGAAGCATACATGACAA | |
| | TTAAAGCCAGG | |
| phoA-vIL10 | GACGCCAGAGAGTTAAGGGGGTTAAATGAA | SEQ ID NO: |
| | ACAATCGACCATCGCATTGGCGCTGCTTCCTC | 236 |
| | TATTGTTCACACCGGTGACAAAGGCA | |
| | GGTACAGACCAATGTGACAATTTTCCCCAAA | |
| | TGTTGAGGGACCTAAGAGATGCCTTCAGTCG | |
| | TGTTAAAACCTTTTTCCAGACAAAGGACGAG | |
| | GTAGATAACCTTTTGCTCAAGGAGTCTCTGCT | |
| | AGAGGACTTTAAGGGCTACCTTGGATGCCAG | |
| | GCCCTGTCAGAAATGATCCAATTCTACCTGG | |
| | AGGAAGTCATGCCACAGGCTGAAAACCAGG | |
| | ACCCTGAAGCCAAAGACCATGTCAATTCTTT | |
| | GGGTGAAAATCTAAAGACCCTACGGCTCCGC | |
| | CTGCGCCGTTGCCACAGGTTCCTGCCGTGTG | |
| | AGAACAAGAGTAAAGCTGTGGAACAGATAA | |
| | AAAATGCCTTTAACAAGCTGCAGGAAAAAGG | |
| | AATTTACAAAGCCATGAGTGAATTTGACATT | |
| | TTTATTAACTACATAGAAGCATACATGACAA | |
| | TTAAAGCCAGG | |
| Ptet- PhoA-IL22 | Gaattcgttaagacccactttcacatttaagttgtttttctaatccgcatat | SEQ ID NO: |
| | gatcaattcaaggccgaataagaaggctggctctgcaccttggtgatca | 237 |
| | aataattcgatagcttgtcgtaataatggcggcatactatcagtagtagg | |
| | tgtttccctttcttctttagcgacttgatgctcttgatcttccaatacgcaac | |
| | ctaaagtaaaatgccccacagcgctgagtgcatataatgcattctctagt | |
| | gaaaaaccttgttggcataaaaaggctaattgattttcgagagtttcata | |
| | ctgtttttctgtaggccgtgtacctaaatgtacttttgctccatcgcgatga | |
| | cttagtaaagcacatctaaaacttttagcgttattacgtaaaaaatcttgc | |
| | cagctttccccttctaaagggcaaaagtgagtatggtgcctatctaacatc | |
| | tcaatggctaaggcgtcgagcaaagcccgcttattttttacatgccaatac | |
| | aatgtaggctgctctacacctagcttctgggcgagtttacgggttgttaaa | |
| | ccttcgattccgacctcattaagcagctctaatgcgctgttaatcactttac | |
| | ttttatctaatctagacatcattaattcctaatttttgttgacactctatcatt | |
| | gatagagttattttaccactccctatcagtgatagagaaaagtgaa | |
| | GACGCCAGAGAGTTAAGGGGGTTAAATGAA | |
| | ACAATCGACCATCGCATTGGCGCTGCTTCCTC | |
| | TATTGTTCACACCGGTGACAAAGGCA | |
| | GCACCGATCTCTTCCCACTGTCGCTTAGATAA | |
| | ATCGAATTTTCAACAACCTTATATTACGAATC | |
| | GTACGTTTATGCTGGCTAAAGAAGCGTCATT | |
| | AGCTGATAACAACACTGATGTTCGCCTGATT | |
| | GGTGAGAAATTGTTTCACGGTGTGTCTATGTC | |
| | AGAACGTTGCTACCTGATGAAACAAGTTCTG | |
| | AATTTCACCCTGGAAGAAGTGTTGTTTCCGC | |
| | AATCTGACCGCTTTCAACCGTATATGCAAGA | |
| | GGTTGTGCCGTTTCTGGCGCGCCTGAGTAATC | |
| | GCCTGAGCACTTGTCATATTGAGGGCGACGA | |
| | CCTGCATATTCAACGAAATGTTCAAAAATTG | |
| | AAAGATACGGTGAAGAAACTGGGTGAAAGT | |
| | GGTGAAATCAAAGCGATTGGTGAGCTGGATC | |
| | TGCTGTTTATGTCATTGCGCAATGCGTGCATT | |
| | TAA | |
| PhoA-IL22 | GACGCCAGAGAGTTAAGGGGGTTAAATGAA | SEQ ID NO: |
| | ACAATCGACCATCGCATTGGCGCTGCTTCCTC | 238 |
| | TATTGTTCACACCGGTGACAAAGGCA | |
| | GCACCGATCTCTTCCCACTGTCGCTTAGATAA | |
| | ATCGAATTTTCAACAACCTTATATTACGAATC | |
| | GTACGTTTATGCTGGCTAAAGAAGCGTCATT | |
| | AGCTGATAACAACACTGATGTTCGCCTGATT | |
| | GGTGAGAAATTGTTTCACGGTGTGTCTATGTC | |
| | AGAACGTTGCTACCTGATGAAACAAGTTCTG | |
| | AATTTCACCCTGGAAGAAGTGTTGTTTCCGC | |
| | AATCTGACCGCTTTCAACCGTATATGCAAGA | |
| | GGTTGTGCCGTTTCTGGCGCGCCTGAGTAATC | |
| | GCCTGAGCACTTGTCATATTGAGGGCGACGA | |
| | CCTGCATATTCAACGAAATGTTCAAAAATTG | |
| | AAAGATACGGTGAAGAAACTGGGTGAAAGT | |
| | GGTGAAATCAAAGCGATTGGTGAGCTGGATC | |
| | TGCTGTTTATGTCATTGCGCAATGCGTGCATT | |
| | TAA | |
| | GACGCCAGAGAGTTAAGGGGGTTAAATGAA | SEQ ID NO: |
| | ACAATCGACCATCGCATTGGCGCTGCTTCCTC | 239 |
| | TATTGTTCACACCGGTGACAAAGGCA | |

[1390] In some embodiments, genetically engineered bacteria comprise a nucleic acid sequence that is at least about 80%, at least about 85%, at least about 90%, at least about 95%, or at least about 99% homologous to the DNA sequence of SEQ ID NO: 232, SEQ ID NO: 233, SEQ ID NO: 2334, SEQ ID NO: 235, SEQ ID NO: 236, SEQ ID NO: 237, SEQ ID NO: 238, and SEQ ID NO: 239.

### Example 27. Bacterial Secretion of hIL-10 and vIL-10

[1391] To determine whether the human IL-10 and vIL-10 expressed by engineered bacteria is secreted, the concentration of IL-10 in the bacterial supernatant from a selection of engineered strains comprising various hIL-10 and vIL-10 constructs/strains was measured (see Table 63, Table 64, Table 65, Table 66, Table 67 for components and sequences for hIL-10 and vIL-10 constructs/strains).

[1392] E. coli Nissle comprising various tet-inducible constructs or constructs under the native fliC promoter were grown overnight in LB medium. Cultures were diluted 1:200 in LB and grown shaking (200 rpm) for 2 hours. Cultures were diluted to an optical density of 0.5 at which time anhydrous tetracycline (ATC) was added to cultures at a concentration of 100 ng/mL to induce expression of hIL-10. No tetracycline was added to cultures harboring the fliC constructs. After 12 hours of induction, cells were spun down, and supernatant was collected. To generate cell free medium, the clarified supernatant was further filtered through a 0.22 micron filter to remove any remaining bacteria and placed on ice. Additionally, to detect intracellular recombinant protein production, pelleted were bacteria washed and resuspended in BugBuster™ (Millipore) with protease inhibitors and Ready-Lyse Lysozyme Solution (Epicentre), resulting in lysate concentrated 10-fold compared to original culture conditions. After incubation at room temperature for 10 minutes unsoluble debris is spun down at 20 min at 12,000 rcf at 4° C. then placed on ice until further processing.

[1393] The concentration of hIL-10 in the cell-free medium and in the bacterial cell extract was measured by hIL-10 ELISA (R&D Systems DY217B), according to manufacturer's instructions. Similarly, to determine the concentrations of vIL-10 an Ultrasensitive ELISA kit (Alpco, 45-I10HUU-E01) was employed using commercially available recombinant vIL-10 (R&D Systems, 915-VL-010). All samples were run in triplicate, and a standard curve was used to calculate secreted levels of IL-10. Standard curves were generated using both human and viral recombinant proteins. Wild type Nissle was included in the ELISA as a negative control, and no signal was observed. Table 68 and Table 69 summarize levels of hIL10 and vIL-10 measured in the supernatant and intracellularly Table 68 and extracellularly Table 69. The data show that both vIL-10 and hIL-10 are secreted at various levels from the different bacterial strains.

TABLE 68
hIL-10 Secretion

| | hu IL-10 (ng/ml) |
|---|---|
| Sample | (extracellular) |
| WT | 0 |
| IL-10 Plasmid (Nissle | 8.4 |
| pUC57.Ptet-phoA-hIL10) | |
| IL-10 plasmid/lpp (lpp::Cm | 19.3 |
| pUC57.Ptet-phoA-hIL10) | |
| 2083 IL-10 plasmid/nlpI (nlpI::Cm | 20.5 |
| pUC57.Ptet-phoA-hIL10) | |
| 2084 IL-10 plasmid/tolA (tolA::Cm | 21.4 |
| pUC57.Ptet-phoA-hIL10) | |
| 2085 IL-10 plasmid/pal (PAL::Cm | 28.4 |
| pUC57.Ptet-phoA-hIL10) | |

TABLE 69
vIL-10 Secretion

| | vIL-10 (ng/ml) |
|---|---|
| Sample | (extracellular) |
| WT | 0 |
| fliC-pvIL10 (Nissle pUN fli-vIL10 | 29 |
| Kan Cm) | |
| fliC ::vIL10 (Nissle fliC::vIL10 | 9 |
| delta fliD CmR) | |
| vIL-10 lpp (Nissle lpp mutant with | 527 |
| vIL10 pBR3222 tet plasmid) | |
| vIL-10 nlpI (Nissle delta nlpI::CmR | 982 |
| pBR322.Ptet-phoA-vIL10) | |
| vIL-10 tolA (Nissle delta tolA::CmR | 428 |
| pBR322.Ptet-phoA-vIL10) | |
| vIL-10 pal (Nissle delta PAL.:CmR | 1090 |
| pBR322.Ptet-phoA-vIL10 | |

[1394] Co-Culture Studies

[1395] To determine whether the hIL-10 and viral IL-10 expressed by the genetically engineered bacteria shown in Table 68 and Table 69 is biologically functional, in vitro experimentation is conducted, in which the bacterial supernatant containing secreted human or viral IL-10 is added to the growth medium of a Raji cells (a hematopoietic cell line) and J774a1 cells (a macrophage cell line). IL-10 is known to induce the phosphorylation of STAT3 in these cells Functional activity of bacterially secreted IL-10 is therefore assessed by its ability to phosphorylate STAT3 in Raji and J774a1 cells.

[1396] Raji cells are grown in RPMI 1640 supplemented with 10% FBS supplemented with 10% fetal bovine serum at 37° C. in a humidified incubator supplemented with 5% CO2. Prior to treatment with the bacterial supernatant, RPMI 1640 supplemented with 10% FBS (1e6/24 well) are serum starved overnight. Titrations of either recombinant human IL-10 diluted in LB or clarified supernatant from wild type Nissle or the engineered bacteria are added to cells for 30 minutes. Cells are harvested and resuspended in lysis buffer, and phospho-STAT3 ELISA (ELISA pSTAT3 (Tyr705) (Cell Signaling Technology)) is run in triplicate for all samples, according to manufacturer's instructions. PBS-treated cells and PBS are added as negative controls. Dilutions of samples are included to demonstrate linearity.

[1397] Competition Studies

[1398] As an additional control for specificity, a competition assay is performed. Titrations of anti-IL10 antibody are pre-incubated with constant concentrations of either rhIL10 (data not shown) or supernatants from the engineered bacteria expressing human or viral IL-10 for 15 min. Next, the supernatants/rhIL10 solutions are added to serum-starved Raji cells (1e6/well) and cells are incubated for 30 min followed by pSTAT3 ELISA as described above.

[1399] In other embodiments, similar studies are conducted with J774a1 cells.

### Example 27. Bacterial Secretion of GLP-2

[1400] To determine whether the human GLP-2 expressed by engineered bacteria is secreted, the concentration of GLP-2 in the bacterial supernatant from two engineered strains comprising GLP-2 constructs/strains was measured. The first strain comprising a deletion in PAL and a plasmid expressing GLP-2 with an OmpF secretion tag from a tetracycline-inducible promoter and the second strain comprises the same PAL deletion and the same plasmid expressing GLP-2, further comprising a deletion in degP (see Table 74).

[1401] E. coli Nissle comprising various tet-inducible constructs or constructs under the native fliC promoter were grown overnight in LB medium. Cultures were diluted 1:200 in LB and grown shaking (200 rpm) for 2 hours. Cultures were diluted to an optical density of 0.5 at which time anhydrous tetracycline (ATC) was added to cultures at a concentration of 100 ng/mL to induce expression of hIL-10. No tetracycline was added to cultures harboring the fliC constructs. After 12 hours of induction, cells were spun down, and supernatant was collected. To generate cell free medium, the clarified supernatant was further filtered through a 0.22-micron filter to remove any remaining bacteria and placed on ice. Additionally, to detect intracellular recombinant protein production, pelleted were bacteria washed and resuspended in BugBuster™ (Millipore) with protease inhibitors and Ready-Lyse Lysozyme Solution (Epicentre), resulting in lysate concentrated 10-fold compared to original culture conditions. After incubation at room temperature for 10 minutes insoluble debris is spun down at 20 min at 12,000 rcf at 4° C. then placed on ice until further processing.

[1402] The concentration of GLP-2 in the cell-free medium and in the bacterial cell extract was measured by Human GLP2 ELISA Kit (Competitive EIA) (LSBio), according to manufacturer's instructions. All samples were run in triplicate, and a standard curve was used to calculate secreted levels of GLP-2. Standard curves were generated using recombinant GLP-2. Wild type Nissle was included in the ELISA as a negative control, and no signal was observed. As seen in Table 70, deletion of degP, a periplasmic protease, improved secretion levels over 3-fold.

TABLE 70
GLP-2 Secretion

| DOM mut | ng/ml |
|---|---|
| WT | 1.14 |
| PAL::CmR Ptet-ompF-GLP2 | 1793.2 |
| PAL::CmR ompT::Kan Ptet-ompF-GLP2 | 1142.1 |
| PAL::CmR ompT::Kan phoA-GLP2 fusion | 5360.4 |

[1403] Co-Culture Studies

[1404] To determine whether the hGLP-2 expressed by the genetically engineered bacteria is biologically functional, in vitro experimentation is conducted, in which the bacterial supernatant (from both strains shown above) containing secreted human GLP-2 is added to the growth medium of Caco-2 cells and CCD-18Co cells. The Caco-2 cell line is a continuous cell of heterogeneous human epithelial colorectal adenocarcinoma cells. As described e.g., in Jasleen et al. (Dig Dis Sci. 2002 May; 47(5): 1135-40) GLP-2 stimulates proliferation and [3H]thymidine incorporation in Caco-2 and T84 cells. Additionally, GLP-2 stimulates VEGFA secretion in these cells (see., e.g., Bulut et al, Eur J Pharmacol. 2008 Jan. 14; 578(2-3):279-85.

[1405] Functional activity of bacterially secreted GLP-2 is therefore assessed by its ability to induce proliferation and VEGF secretion.

[1406] Caco-2 are grown in Dulbecco's modified Eagle's medium supplemented with 10% fetal bovine serum at 37° C. in a humidified incubator supplemented with 5% CO2. Prior to treatment with the bacterial supernatant, Caco-2 cells (1e6/24 well) are serum starved overnight. Titrations of either recombinant human GLP-2 (50 and 250 nM) diluted in LB or clarified supernatant from wild type Nissle or the engineered bacteria are added to cells for a defined time.

[1407] For cell proliferation assays, cells are harvested and resuspended in lysis buffer. The cells are assayed after 12, 24, 48, and 72 hours of incubation. Cell proliferation is measured using a Cell proliferation assay kit according to manufacturers instruction (e.g., a Cell viability was assessed by a 3-[4, 5-dimethylthiazol-2-yl]-2, 5-diphenyl-tetrazolium bromide (MTT)-assay).

[1408] For the measurements of VEFA secretion, cells are harvested and resuspended in lysis buffer, and concentrations of GLP-2 in the medium are determined ELISA

[1409] PBS-treated cells and PBS are added as negative controls. Dilutions of samples are included to demonstrate linearity.

### Competition Studies

[1410] As an additional control for specificity, a competition assay is performed. Titrations of anti-GLP-2 antibody are pre-incubated with constant concentrations of either recombinant GLP-2 or supernatants from the engineered bacteria for 15 min. Next, the supernatants/rhIL2 solutions are added to serum-starved Cac-2 cells (1e6/well) and cells are incubated for 30 min followed by VEGFA ELISA as described above.

### Example 28. Bacterial Secretion of IL-22

[1411] To determine whether the human IL-22 expressed by engineered bacteria is secreted, the concentration of IL-22 in the bacterial supernatant from a two engineered strains comprising IL-22 constructs/strains was measured. The first strain comprising a deletion in PAL and a plasmid expressing IL-22 with an OmpF secretion tag from a tetracycline-inducible promoter and the second strain comprises the same PAL deletion and the same plasmid expressing IL-22, further comprising a deletion in degP (Table 71).

[1412] E. coli Nissle comprising various tet-inducible constructs or constructs under the native fliC promoter were grown overnight in LB medium. Cultures were diluted 1:200 in LB and grown shaking (200 rpm) for 2 hours. Cultures were diluted to an optical density of 0.5 at which time anhydrous tetracycline (ATC) was added to cultures at a concentration of 100 ng/mL to induce expression of hIL-10. No tetracycline was added to cultures harboring the fliC constructs. After 12 hours of induction, cells were spun down, and supernatant was collected. To generate cell free medium, the clarified supernatant was further filtered through a 0.22 micron filter to remove any remaining bacteria and placed on ice. Additionally, to detect intracellular recombinant protein production, pelleted were bacteria washed and resuspended in BugBuster™ (Millipore) with protease inhibitors and Ready-Lyse Lysozyme Solution (Epicentre), resulting in lysate concentrated 10-fold compared to original culture conditions. After incubation at room temperature for 10 minutes unsoluble debris is spun down at 20 min at 12,000 rcf at 4° C. then placed on ice until further processing.

[1413] The concentration of IL-22 in the cell-free medium and in the bacterial cell extract was measured by hIL-22 ELISA (R&D Systems (DY782) ELISA for hIL-22), according to manufacturer's instructions. All samples were run in triplicate, and a standard curve was used to calculate secreted levels of IL-22. Standard curves were generated using recombinant IL-22. Wild type Nissle was included in the ELISA as a negative control, and no signal was observed. Table 71 summarizes levels of IL-22 measured in the supernatant. The data show that both hIL-22 are secreted at various levels from the different bacterial strains.

TABLE 71
IL-22 Secretion

| | IL-22 Production/ |
|---|---|
| | Secretion Dilution |
| Genotype | Corrected (ng/ml) |
| WT | 20.7 |
| Lpp (delta lpp::CmR expressing | 87.6 |
| PhoA-IL22 from Ptet) | |
| nlpI (delta nlpI::CmR expressing | 105.4 |
| PhoA-IL22 from Ptet) | |
| tolA (delta tolA::CmR expressing | 623.2 |
| PhoA-IL22 from Ptet) | |
| PAL (delta pal::CmR expressing | 328.8 |
| PhoA-IL22 from Ptet) | |

### Example 29. Bacterial Secretion of IL-22 and Functional Assays

[1414] Generation of Bacterial Supernatant and Measurement of IL-22 Concentration

[1415] To determine whether the human IL-22 expressed by engineered bacteria is secreted, the concentration of IL-22 in the bacterial supernatant was measured.

[1416] E. coli Nissle comprising a tet-inducible integrated construct (delta pal::CmR expressing PhoA-IL22 from Ptet) was grown overnight in LB medium. Cultures were diluted 1:200 in LB and grown shaking (200 rpm) for 2 hours. Cultures were diluted to an optical density of 0.5 at which time anhydrous tetracycline (ATC) was added to cultures at a concentration of 100 ng/mL to induce expression of hIL-22, After 12 hours of induction, cells were spun down, and supernatant was collected. To generate cell free medium, the supernatant was centrifuged, and filtered through a 0.22 micron filter to remove any remaining bacteria.

[1417] The concentration of hIL-22 in the cell-free medium was measured by hIL-22 ELISA (R&D Systems (DY782) ELISA for hIL-22), according to manufacturer's instructions. All samples were run in triplicate, and a standard curve was used to calculate secreted levels of IL-22. Additionally, samples were diluted to ensure absence of matrix effects and to demonstrate linearity. Wild type Nissle was included in the ELISA as a negative control, and no signal was observed. The engineered bacteria comprising a PAL deletion and the integrated construct encoding hIL-22 with a phoA secretion tag were determined to be secreting at 199 ng/ml supernatant.

[1418] Co-Culture Studies

[1419] To determine whether the hIL-22 expressed by the genetically engineered bacteria is biologically functional, in vitro experimentation was conducted, in which the bacterial supernatant containing secreted human IL-22 was added to the growth medium of a mammalian colonic epithelial cell line. IL-22 is known to induce the phosphorylation of STAT1 and STAT3 in Colo205 cells (see, e.g., Nagalakshmi et al., Interleukin-22 activates STAT3 and induces IL-10 by colon epithelial cells. Int Immunopharmacol. 2004 May; 4(5):679-91). Functional activity of bacterially secreted IL-22 was therefore assessed by its ability to phosphorylate STAT3 in Colo205 cells.

[1420] Colo205 cells were grown in Dulbecco's modified Eagle's medium supplemented with 10% fetal bovine serum at 37° C. in a humidified incubator supplemented with 5% CO2. Prior to treatment with the bacterial supernatant, Colo205 (1e6/24 well) were serum starved overnight. Titrations of either recombinant human IL-22 diluted in LB or clarified supernatant from wild type Nissle or the engineered bacteria were added to cells for 30 minutes. Cells were harvested and resuspended in lysis buffer, and phospho-STAT3 ELISA (ELISA pSTAT3 (Tyr705) (Cell Signaling Technology)) was run in triplicate for all samples, according to manufacturer's instructions. PBS-treated cells and PBS were added as negative controls. Dilutions of samples were included to demonstrate linearity. No signal was observed for wild type Nissle. Results for the engineered strain comprising a PAL deletion and the integrated construct encoding hIL-22 with a phoA secretion tag are shown in FIG. 33A, and demonstrate that hIL-22 secreted from the engineered bacteria is functionally active.

[1421] Competition Studies

[1422] As an additional control for specificity, a competition assay was performed. Titrations of anti-IL22 antibody (MAB7821, R&D Systems) were pre-incubated with constant concentrations of either rhIL22 (data not shown) or supernatants from the engineered bacteria for 15 min. Next, the supernatants/rhIL2 solutions were added to serum-starved Colo205 cells (1e6/well) and cells were incubated for 30 min followed by pSTAT3 ELISA as described above. As shown in FIG. 33B, the phospho-Stat3 signal induced by the secreted hIL-22 is competed by the hIL-22 antibody MAB7821.

### Example 30. Generation of Indole Propionic Acid Strain and In Vitro Indole Production

[1423] To facilitate inducible production of indole propionic acid (IPA) in Escherichia coli Nissle, 6 genes allowing the production of indole propionic acid from tryptophan, as well as transcriptional and translational elements, are synthesized (Gen9, Cambridge, Mass.) and cloned into vector pBR322 under a tet inducible promoter. In other embodiments, the IPA synthesis cassette is put under the control of an FNR, RNS or ROS promoter, e.g., described herein, or other promoter induced by conditions in the healthy or diseased gut, e.g., inflammatory conditions. For efficient translation of IPA synthesis genes, each synthetic gene in the cassette is separated by a 15 base pair ribosome binding site derived from the T7 promoter/translational start site.

[1424] The IPA synthesis cassette comprises TrpDH (tryptophan dehydrogenase from Nostoc punctiforme NIES-2108), FldH1/FldH2 (indole-3-lactate dehydrogenase from Clostridium sporogenes), FldA (indole-3-propionyl-CoA:indole-3-lactate CoA transferase from Clostridium sporogenes), FldBC (indole-3-lactate dehydratase from Clostridium sporogenes), FldD (indole-3-acrylyl-CoA reductase from Clostridium sporogenes), and AcuI (acrylyl-CoA reductase from Rhodobacter sphaeroides).

[1425] The tet inducible IPA construct described above is transformed into E. coli Nissle as described herein and production of IPA is assessed. In certain embodiments, E. coli Nissle strains containing the IPA synthesis cassette described further comprise a tryptophan synthesis cassette. In certain embodiments, the strains comprise a feedback resistant version of AroG and TrpE to achieve greater Trp production. In certain embodiments, additionally, the tnaA gene (tryptophanase converting Trp into indole) is deleted.

[1426] All incubations are performed at 37° C. LB-grown overnight cultures of E. coli Nissle transformed with the IPA biosynthesis construct alone or in combination with a tryptophan biosynthesis construct and feedback resistant AroG and TrpE are subcultured 1:100 into 10 mL of M9 minimal medium containing 0.5% glucose and grown shaking (200 rpm) for 2 h, at which time anhydrous tetracycline (ATC) is added to cultures at a concentration of 100 ng/mL to induce expression of the the IPA biosynthesis and tryptophan biosynthesis constructs. After 2 hours of induction, cells are spun down, supernatant is discarded, and the cells are resuspended in M9 minimal media containing 0.5% glucose. Culture supernatant is then analyzed at predetermined time points (e.g., 0 up to 24 hours) by LC-MS to assess levels of IPA.

[1427] Production of IPA is also assessed in E. coli Nissle strains containing the IPA and tryptophan cassettes both driven by an RNS promoter e.g., a nsrR-norB-IPA biosynthesis construct) in order to assess nitrogen dependent induction of IPA production. Overnight bacterial cultures are diluted 1:100 into fresh LB and grown for 1.5 hrs to allow entry into early log phase. At this point, long half-life nitric oxide donor (DETA-NO; diethylenetriamine-nitric oxide adduct) wis added to cultures at a final concentration of 0.3 mM to induce expression from plasmid. After 2 hours of induction, cells are spun down, supernatant is discarded, and the cells are resuspended in M9 minimal media containing 0.5% glucose. Culture supernatant is then analyzed at predetermined time points (0 up to 24 hours, as shown in FIG. 33) to assess IPA levels.

[1428] In alternate embodiments, production of IPA is also assessed in E. coli Nissle strains containing the IPA and tryptophan cassettes both driven by the low oxygen inducible FNR promoter, e.g., FNRS, or the the reactive oxygen regulated OxyS promoter.

### Example 31. FNR Promoter Activity

[1429] In order to measure the promoter activity of different FNR promoters, the lacZ gene, as well as transcriptional and translational elements, were synthesized (Gen9, Cambridge, Mass.) and cloned into vector pBR322. The lacZ gene was placed under the control of any of the exemplary FNR promoter sequences disclosed in Table 21. The nucleotide sequences of these constructs are shown in Table 72 through Table 76 ((SEQ ID NO: 240-244). However, as noted above, the lacZ gene may be driven by other inducible promoters in order to analyze activities of those promoters, and other genes may be used in place of the lacZ gene as a readout for promoter activity, exemplary results are shown in the figures.

[1430] Table 72 shows the nucleotide sequence of an exemplary construct comprising a gene encoding lacZ, and an exemplary FNR promoter, P_{fnr1} (SEQ ID NO: 240). The construct comprises a translational fusion of the Nissle nirB1 gene and the lacZ gene, in which the translational fusions are fused in frame to the 8^{th} codon of the lacZ coding region. The P_{fnr1} sequence is bolded lower case, and the predicted ribosome binding site within the promoter is underlined. The lacZ sequence is underlined upper case. ATG site is bolded upper case, and the cloning sites used to synthesize the construct are shown in regular upper case.

[1431] Table 73 shows the nucleotide sequence of an exemplary construct comprising a gene encoding lacZ, and an exemplary FNR promoter, P_{fnr2} ((SEQ ID NO: 241). The construct comprises a translational fusion of the Nissle ydfZ gene and the lacZ gene, in which the translational fusions are fused in frame to the 8^{th} codon of the lacZ coding region. The P_{fnr2} sequence is bolded lower case, and the predicted ribosome binding site within the promoter is underlined. The lacZ sequence is underlined upper case. ATG site is bolded upper case, and the cloning sites used to synthesize the construct are shown in regular upper case.

[1432] Table 74 shows the nucleotide sequence of an exemplary construct comprising a gene encoding lacZ, and an exemplary FNR promoter, P_{fnr3} ((SEQ ID NO: 242). The construct comprises a transcriptional fusion of the Nissle nirB gene and the lacZ gene, in which the transcriptional fusions use only the promoter region fused to a strong ribosomal binding site. The P_{fnr3} sequence is bolded lower case, and the predicted ribosome binding site within the promoter is underlined. The lacZ sequence is underlined upper case. ATG site is bolded upper case, and the cloning sites used to synthesize the construct are shown in regular upper case.

[1433] Table 75 shows the nucleotide sequence of an exemplary construct comprising a gene encoding lacZ, and an exemplary FNR promoter, Pfnr4 ((SEQ ID NO: 243). The construct comprises a transcriptional fusion of the Nissle ydfZ gene and the lacZ gene. The P_{fnr4} sequence is bolded lower case, and the predicted ribosome binding site within the promoter is underlined. The lacZ sequence is underlined upper case. ATG site is bolded upper case, and the cloning sites used to synthesize the construct are shown in regular upper case.

[1434] Table 76 shows the nucleotide sequence of an exemplary construct comprising a gene encoding lacZ, and an exemplary FNR promoter, PfnrS ((SEQ ID NO: 244). The construct comprises a transcriptional fusion of the anaerobically induced small RNA gene, fnrS1, fused to lacZ. The P_{fnrs} sequence is bolded lower case, and the predicted ribosome binding site within the promoter is underlined. The lacZ sequence is underlined upper case. ATG site is bolded upper case, and the cloning sites used to synthesize the construct are shown in regular upper case.

TABLE 72
Pfnr1-lacZ construct Sequences
Nucleotide sequences of Pfnr1-lacZ construct,
low-copy (SEQ ID NO: 240)

GGTACCgtcagcataacaccctgacctctcattaattgttcatgccggg
cggcactatcgtcgtccggccttttcctctcttactctgctacgtacat
ctatttctataaatccgttcaatttgtctgttttttgcacaaacatgaa
atatcagacaattccgtgacttaagaaaatttatacaaatcagcaatat
accccttaaggagtatataaaggtgaatttgatttacatcaataagcgg
ggttgctgaatcgttaaggtaggcggtaatagaaaagaaatcgaggcaa
aaATGagcaaagtcagactcgcaattatGGATCCTCTGGCCGTCGTATT
ACAACGTCGTGACTGGGAAAACCCTGGCGTTACCCAACTTAATCGCCTT
GCGGCACATCCCCCTTTCGCCAGCTGGCGTAATAGCGAAGAGGCCCGCA
CCGATCGCCCTTCCCAACAGTTGCGCAGCCTGAATGGCGAATGGCGCTT
TGCCTGGTTTCCGGCACCAGAAGCGGTGCCGGAAAGCTGGCTGGAGTGC
GATCTTCCTGACGCCGATACTGTCGTCGTCCCCTCAAACTGGCAGATGC
ACGGTTACGATGCGCCTATCTACACCAACGTGACCTATCCCATTACGGT
CAATCCGCCGTTTGTTCCCGCGGAGAATCCGACAGGTTGTTACTCGCTC
ACATTTAATATTGATGAAAGCTGGCTACAGGAAGGCCAGACGCGAATTA
TTTTTGATGGCGTTAACTCGGCGTTTCATCTGTGGTGCAACGGGCGCTG
GGTCGGTTACGGCCAGGACAGCCGTTTGCCGTCTGAATTTGACCTGAGC
GCATTTTTACGCGCCGGAGAAAACCGCCTCGCGGTGATGGTGCTGCGCT
GGAGTGACGGCAGTTATCTGGAAGATCAGGATATGTGGCGGATGAGCGG
CATTTTCCGTGACGTCTCGTTGCTGCATAAACCGACCACGCAAATCAGC
GATTTCCAAGTTACCACTCTCTTTAATGATGATTTCAGCCGCGCGGTAC
TGGAGGCAGAAGTTCAGATGTACGGCGAGCTGCGCGATGAACTGCGGGT
GACGGTTTCTTTGTGGCAGGGTGAAACGCAGGTCGCCAGCGGCACCGCG
CCTTTCGGCGGTGAAATTATCGATGAGCGTGGCGGTTATGCCGATCGCG
TCACACTACGCCTGAACGTTGAAAATCCGGAACTGTGGAGCGCCGAAAT
CCCGAATCTCTATCGTGCAGTGGTTGAACTGCACACCGCCGACGGCACG
CTGATTGAAGCAGAAGCCTGCGACGTCGGTTTCCGCGAGGTGCGGATTG
AAAATGGTCTGCTGCTGCTGAACGGCAAGCCGTTGCTGATTCGCGGCGT
TAACCGTCACGAGCATCATCCTCTGCATGGTCAGGTCATGGATGAGCAG
ACGATGGTGCAGGATATCCTGCTGATGAAGCAGAACAACTTTAACGCCG
TGCGCTGTTCGCATTATCCGAACCATCCGCTGTGGTACACGCTGTGCGA
CCGCTACGGCCTGTATGTGGTGGATGAAGCCAATATTGAAACCCACGGC
ATGGTGCCAATGAATCGTCTGACCGATGATCCGCGCTGGCTACCCGCGA
TGAGCGAACGCGTAACGCGGATGGTGCAGCGCGATCGTAATCACCCGAG
TGTGATCATCTGGTCGCTGGGGAATGAATCAGGCCACGGCGCTAATCAC
GACGCGCTGTATCGCTGGATCAAATCTGTCGATCCTTCCCGCCCGGTAC
AGTATGAAGGCGGCGGAGCCGACACCACGGCCACCGATATTATTTGCCC
GATGTACGCGCGCGTGGATGAAGACCAGCCCTTCCCGGCGGTGCCGAAA
TGGTCCATCAAAAAATGGCTTTCGCTGCCTGGAGAAATGCGCCCGCTGA
TCCTTTGCGAATATGCCCACGCGATGGGTAACAGTCTTGGCGGCTTCGC
TAAATACTGGCAGGCGTTTCGTCAGTACCCCCGTTTACAGGGCGGCTTC
GTCTGGGACTGGGTGGATCAGTCGCTGATTAAATATGATGAAAACGGCA
ACCCGTGGTCGGCTTACGGCGGTGATTTTGGCGATACGCCGAACGATCG
CCAGTTCTGTATGAACGGTCTGGTCTTTGCCGACCGCACGCCGCATCCG
GCGCTGACGGAAGCAAAACACCAACAGCAGTATTTCCAGTTCCGTTTAT
CCGGGCGAACCATCGAAGTGACCAGCGAATACCTGTTCCGTCATAGCGA
TAACGAGTTCCTGCACTGGATGGTGGCACTGGATGGCAAGCCGCTGGCA
AGCGGTGAAGTGCCTCTGGATGTTGGCCCGCAAGGTAAGCAGTTGATTG
AACTGCCTGAACTGCCGCAGCCGGAGAGCGCCGGACAACTCTGGCTAAC
GGTACGCGTAGTGCAACCAAACGCGACCGCATGGTCAGAAGCCGGACAC
ATCAGCGCCTGGCAGCAATGGCGTCTGGCGGAAAACCTCAGCGTGACAC
TCCCCTCCGCGTCCCACGCCATCCCTCAACTGACCACCAGCGGAACGGA
TTTTTGCATCGAGCTGGGTAATAAGCGTTGGCAATTTAACCGCCAGTCA
GGCTTTCTTTCACAGATGTGGATTGGCGATGAAAAACAACTGCTGACCC
CGCTGCGCGATCAGTTCACCCGTGCGCCGCTGGATAACGACATTGGCGT
AAGTGAAGCGACCCGCATTGACCCTAACGCCTGGGTCGAACGCTGGAAG
GCGGCGGGCCATTACCAGGCCGAAGCGGCGTTGTTGCAGTGCACGGCAG
ATACACTTGCCGACGCGGTGCTGATTACAACCGCCCACGCGTGGCAGCA
TCAGGGGAAAACCTTATTTATCAGCCGGAAAACCTACCGGATTGATGGG
CACGGTGAGATGGTCATCAATGTGGATGTTGCGGTGGCAAGCGATACAC
CGCATCCGGCGCGGATTGGCCTGACCTGCCAGCTGGCGCAGGTCTCAGA
GCGGGTAAACTGGCTCGGCCTGGGGCCGCAAGAAAACTATCCCGACCGC
CTTACTGCAGCCTGTTTTGACCGCTGGGATCTGCCATTGTCAGACATGT
ATACCCCGTACGTCTTCCCGAGCGAAAACGGTCTGCGCTGCGGGACGCG
CGAATTGAATTATGGCCCACACCAGTGGCGCGGCGACTTCCAGTTCAAC
ATCAGCCGCTACAGCCAACAACAACTGATGGAAACCAGCCATCGCCATC
TGCTGCACGCGGAAGAAGGCACATGGCTGAATATCGACGGTTTCCATAT
GGGGATTGGTGGCGACGACTCCTGGAGCCCGTCAGTATCGGCGGAATTC
CAGCTGAGCGCCGGTCGCTACCATTACCAGTTGGTCTGGTGTCAAAAAT
AA

TABLE 73
Pfnr2-lacZ construct sequences
Nucleotide sequences of Pfnr2-lacZ construct,
low-copy (SEQ ID NO: 241)

GGTACCcatttcctctcatcccatccggggtgagagtcttttcccccga
cttatggctcatgcatgcatcaaaaaagatgtgagcttgatcaaaaaca
aaaaatatttcactcgacaggagtatttatattgcgcccgttacgtggg
cttcgactgtaaatcagaaaggagaaaacacctATGacgacctacgatc
gGGATCCTCTGGCCGTCGTATTACAACGTCGTGACTGGGAAAACCCTGG
CGTTACCCAACTTAATCGCCTTGCGGCACATCCCCCTTTCGCCAGCTGG
CGTAATAGCGAAGAGGCCCGCACCGATCGCCCTTCCCAACAGTTGCGCA
GCCTGAATGGCGAATGGCGCTTTGCCTGGTTTCCGGCACCAGAAGCGGT
GCCGGAAAGCTGGCTGGAGTGCGATCTTCCTGACGCCGATACTGTCGTC
GTCCCCTCAAACTGGCAGATGCACGGTTACGATGCGCCTATCTACACCA
ACGTGACCTATCCCATTACGGTCAATCCGCCGTTTGTTCCCGCGGAGAA
TCCGACAGGTTGTTACTCGCTCACATTTAATATTGATGAAAGCTGGCTA
CAGGAAGGCCAGACGCGAATTATTTTTGATGGCGTTAACTCGGCGTTTC
ATCTGTGGTGCAACGGGCGCTGGGTCGGTTACGGCCAGGACAGCCGTTT
GCCGTCTGAATTTGACCTGAGCGCATTTTTACGCGCCGGAGAAAACCGC
CTCGCGGTGATGGTGCTGCGCTGGAGTGACGGCAGTTATCTGGAAGATC
AGGATATGTGGCGGATGAGCGGCATTTTCCGTGACGTCTCGTTGCTGCA
TAAACCGACCACGCAAATCAGCGATTTCCAAGTTACCACTCTCTTTAAT
GATGATTTCAGCCGCGCGGTACTGGAGGCAGAAGTTCAGATGTACGGCG
AGCTGCGCGATGAACTGCGGGTGACGGTTTCTTTGTGGCAGGGTGAAAC
GCAGGTCGCCAGCGGCACCGCGCCTTTCGGCGGTGAAATTATCGATGAG
CGTGGCGGTTATGCCGATCGCGTCACACTACGCCTGAACGTTGAAAATC
CGGAACTGTGGAGCGCCGAAATCCCGAATCTCTATCGTGCAGTGGTTGA
ACTGCACACCGCCGACGGCACGCTGATTGAAGCAGAAGCCTGCGACGTC
GGTTTCCGCGAGGTGCGGATTGAAAATGGTCTGCTGCTGCTGAACGGCA
AGCCGTTGCTGATTCGCGGCGTTAACCGTCACGAGCATCATCCTCTGCA
TGGTCAGGTCATGGATGAGCAGACGATGGTGCAGGATATCCTGCTGATG
AAGCAGAACAACTTTAACGCCGTGCGCTGTTCGCATTATCCGAACCATC
CGCTGTGGTACACGCTGTGCGACCGCTACGGCCTGTATGTGGTGGATGA
AGCCAATATTGAAACCCACGGCATGGTGCCAATGAATCGTCTGACCGAT
GATCCGCGCTGGCTACCCGCGATGAGCGAACGCGTAACGCGGATGGTGC
AGCGCGATCGTAATCACCCGAGTGTGATCATCTGGTCGCTGGGGAATGA
ATCAGGCCACGGCGCTAATCACGACGCGCTGTATCGCTGGATCAAATCT
GTCGATCCTTCCCGCCCGGTACAGTATGAAGGCGGCGGAGCCGACACCA
CGGCCACCGATATTATTTGCCCGATGTACGCGCGCGTGGATGAAGACCA
GCCCTTCCCGGCGGTGCCGAAATGGTCCATCAAAAAATGGCTTTCGCTG
CCTGGAGAAATGCGCCCGCTGATCCTTTGCGAATATGCCCACGCGATGG
GTAACAGTCTTGGCGGCTTCGCTAAATACTGGCAGGCGTTTCGTCAGTA
CCCCCGTTTACAGGGCGGCTTCGTCTGGGACTGGGTGGATCAGTCGCTG
ATTAAATATGATGAAAACGGCAACCCGTGGTCGGCTTACGGCGGTGATT
TTGGCGATACGCCGAACGATCGCCAGTTCTGTATGAACGGTCTGGTCTT
TGCCGACCGCACGCCGCATCCGGCGCTGACGGAAGCAAAACACCAACAG
CAGTATTTCCAGTTCCGTTTATCCGGGCGAACCATCGAAGTGACCAGCG
AATACCTGTTCCGTCATAGCGATAACGAGTTCCTGCACTGGATGGTGGC
ACTGGATGGCAAGCCGCTGGCAAGCGGTGAAGTGCCTCTGGATGTTGGC
CCGCAAGGTAAGCAGTTGATTGAACTGCCTGAACTGCCGCAGCCGGAGA
GCGCCGGACAACTCTGGCTAACGGTACGCGTAGTGCAACCAAACGCGAC
CGCATGGTCAGAAGCCGGACACATCAGCGCCTGGCAGCAATGGCGTCTG
GCGGAAAACCTCAGCGTGACACTCCCCTCCGCGTCCCACGCCATCCCTC
AACTGACCACCAGCGGAACGGATTTTTGCATCGAGCTGGGTAATAAGCG
TTGGCAATTTAACCGCCAGTCAGGCTTTCTTTCACAGATGTGGATTGGC
GATGAAAAACAACTGCTGACCCCGCTGCGCGATCAGTTCACCCGTGCGC
CGCTGGATAACGACATTGGCGTAAGTGAAGCGACCCGCATTGACCCTAA
CGCCTGGGTCGAACGCTGGAAGGCGGCGGGCCATTACCAGGCCGAAGCG
GCGTTGTTGCAGTGCACGGCAGATACACTTGCCGACGCGGTGCTGATTA
CAACCGCCCACGCGTGGCAGCATCAGGGGAAAACCTTATTTATCAGCCG
GAAAACCTACCGGATTGATGGGCACGGTGAGATGGTCATCAATGTGGAT
GTTGCGGTGGCAAGCGATACACCGCATCCGGCGCGGATTGGCCTGACCT
GCCAGCTGGCGCAGGTCTCAGAGCGGGTAAACTGGCTCGGCCTGGGGCC
GCAAGAAAACTATCCCGACCGCCTTACTGCAGCCTGTTTTGACCGCTGG
GATCTGCCATTGTCAGACATGTATACCCCGTACGTCTTCCCGAGCGAAA
ACGGTCTGCGCTGCGGGACGCGCGAATTGAATTATGGCCCACACCAGTG
GCGCGGCGACTTCCAGTTCAACATCAGCCGCTACAGCCAACAACAACTG
ATGGAAACCAGCCATCGCCATCTGCTGCACGCGGAAGAAGGCACATGGC
TGAATATCGACGGTTTCCATATGGGGATTGGTGGCGACGACTCCTGGAG
CCCGTCAGTATCGGCGGAATTCCAGCTGAGCGCCGGTCGCTACCATTAC
AGTTGGTCTGGTGTCAAAAATAA

TABLE 74
Pfnr3-lacZ construct Sequences
Nucleotide sequences of Pfnr3-lacZ construct,
low-copy (SEQ ID NO: 242)

GGTACCgtcagcataacaccctgacctctcattaattgttcatgccggg
cggcactatcgtcgtccggccttttcctctcttactctgctacgtacat
ctatttctataaatccgttcaatttgtctgttttttgcacaaacatgaa
atatcagacaattccgtgacttaagaaaatttatacaaatcagcaatat
accccttaaggagtatataaaggtgaatttgatttacatcaataagcgg
ggttgctgaatcgttaaGGATCCctctagaaataattttgtttaacttt
aagaaggagatatacatATGACTATGATTACGGATTCTCTGGCCGTCGT
ATTACAACGTCGTGACTGGGAAAACCCTGGCGTTACCCAACTTAATCGC
CTTGCGGCACATCCCCCTTTCGCCAGCTGGCGTAATAGCGAAGAGGCCC
GCACCGATCGCCCTTCCCAACAGTTGCGCAGCCTGAATGGCGAATGGCG
CTTTGCCTGGTTTCCGGCACCAGAAGCGGTGCCGGAAAGCTGGCTGGAG
TGCGATCTTCCTGACGCCGATACTGTCGTCGTCCCCTCAAACTGGCAGA
TGCACGGTTACGATGCGCCTATCTACACCAACGTGACCTATCCCATTAC
GGTCAATCCGCCGTTTGTTCCCGCGGAGAATCCGACAGGTTGTTACTCG
CTCACATTTAATATTGATGAAAGCTGGCTACAGGAAGGCCAGACGCGAA
TTATTTTTGATGGCGTTAACTCGGCGTTTCATCTGTGGTGCAACGGGCG
CTGGGTCGGTTACGGCCAGGACAGCCGTTTGCCGTCTGAATTTGACCTG
AGCGCATTTTTACGCGCCGGAGAAAACCGCCTCGCGGTGATGGTGCTGC
GCTGGAGTGACGGCAGTTATCTGGAAGATCAGGATATGTGGCGGATGAG
CGGCATTTTCCGTGACGTCTCGTTGCTGCATAAACCGACCACGCAAATC
AGCGATTTCCAAGTTACCACTCTCTTTAATGATGATTTCAGCCGCGCGG
TACTGGAGGCAGAAGTTCAGATGTACGGCGAGCTGCGCGATGAACTGCG
GGTGACGGTTTCTTTGTGGCAGGGTGAAACGCAGGTCGCCAGCGGCACC
GCGCCTTTCGGCGGTGAAATTATCGATGAGCGTGGCGGTTATGCCGATC
GCGTCACACTACGCCTGAACGTTGAAAATCCGGAACTGTGGAGCGCCGA
AATCCCGAATCTCTATCGTGCAGTGGTTGAACTGCACACCGCCGACGGC
ACGCTGATTGAAGCAGAAGCCTGCGACGTCGGTTTCCGCGAGGTGCGGA
TTGAAAATGGTCTGCTGCTGCTGAACGGCAAGCCGTTGCTGATTCGCGG
CGTTAACCGTCACGAGCATCATCCTCTGCATGGTCAGGTCATGGATGAG
CAGACGATGGTGCAGGATATCCTGCTGATGAAGCAGAACAACTTTAACG
CCGTGCGCTGTTCGCATTATCCGAACCATCCGCTGTGGTACACGCTGTG
CGACCGCTACGGCCTGTATGTGGTGGATGAAGCCAATATTGAAACCCAC
GGCATGGTGCCAATGAATCGTCTGACCGATGATCCGCGCTGGCTACCCG
CGATGAGCGAACGCGTAACGCGGATGGTGCAGCGCGATCGTAATCACCC
GAGTGTGATCATCTGGTCGCTGGGGAATGAATCAGGCCACGGCGCTAAT
CACGACGCGCTGTATCGCTGGATCAAATCTGTCGATCCTTCCCGCCCGG
TACAGTATGAAGGCGGCGGAGCCGACACCACGGCCACCGATATTATTTG
CCCGATGTACGCGCGCGTGGATGAAGACCAGCCCTTCCCGGCGGTGCCG
AAATGGTCCATCAAAAAATGGCTTTCGCTGCCTGGAGAAATGCGCCCGC
TGATCCTTTGCGAATATGCCCACGCGATGGGTAACAGTCTTGGCGGCTT
CGCTAAATACTGGCAGGCGTTTCGTCAGTACCCCCGTTTACAGGGCGGC
TTCGTCTGGGACTGGGTGGATCAGTCGCTGATTAAATATGATGAAAACG
GCAACCCGTGGTCGGCTTACGGCGGTGATTTTGGCGATACGCCGAACGA
TCGCCAGTTCTGTATGAACGGTCTGGTCTTTGCCGACCGCACGCCGCAT
CCGGCGCTGACGGAAGCAAAACACCAACAGCAGTATTTCCAGTTCCGTT
TATCCGGGCGAACCATCGAAGTGACCAGCGAATACCTGTTCCGTCATAG
CGATAACGAGTTCCTGCACTGGATGGTGGCACTGGATGGCAAGCCGCTG
GCAAGCGGTGAAGTGCCTCTGGATGTTGGCCCGCAAGGTAAGCAGTTGA
TTGAACTGCCTGAACTGCCGCAGCCGGAGAGCGCCGGACAACTCTGGCT
AACGGTACGCGTAGTGCAACCAAACGCGACCGCATGGTCAGAAGCCGGA
CACATCAGCGCCTGGCAGCAATGGCGTCTGGCGGAAAACCTCAGCGTGA
CACTCCCCTCCGCGTCCCACGCCATCCCTCAACTGACCACCAGCGGAAC
GGATTTTTGCATCGAGCTGGGTAATAAGCGTTGGCAATTTAACCGCCAG
TCAGGCTTTCTTTCACAGATGTGGATTGGCGATGAAAAACAACTGCTGA
CCCCGCTGCGCGATCAGTTCACCCGTGCGCCGCTGGATAACGACATTGG
CGTAAGTGAAGCGACCCGCATTGACCCTAACGCCTGGGTCGAACGCTGG
AAGGCGGCGGGCCATTACCAGGCCGAAGCGGCGTTGTTGCAGTGCACGG
CAGATACACTTGCCGACGCGGTGCTGATTACAACCGCCCACGCGTGGCA
GCATCAGGGGAAAACCTTATTTATCAGCCGGAAAACCTACCGGATTGAT
GGGCACGGTGAGATGGTCATCAATGTGGATGTTGCGGTGGCAAGCGATA
CACCGCATCCGGCGCGGATTGGCCTGACCTGCCAGCTGGCGCAGGTCTC
AGAGCGGGTAAACTGGCTCGGCCTGGGGCCGCAAGAAAACTATCCCGAC
CGCCTTACTGCAGCCTGTTTTGACCGCTGGGATCTGCCATTGTCAGACA
TGTATACCCCGTACGTCTTCCCGAGCGAAAACGGTCTGCGCTGCGGGAC
GCGCGAATTGAATTATGGCCCACACCAGTGGCGCGGCGACTTCCAGTTC
AACATCAGCCGCTACAGCCAACAACAACTGATGGAAACCAGCCATCGCC
ATCTGCTGCACGCGGAAGAAGGCACATGGCTGAATATCGACGGTTTCCA
TATGGGGATTGGTGGCGACGACTCCTGGAGCCCGTCAGTATCGGCGGAA
TTCCAGCTGAGCGCCGGTCGCTACCATTACCAGTTGGTCTGGTGTCAAA
AATAA

TABLE 75
Pfnr4-lacZ construct Sequences
Nucleotide sequences of Pfnr4-lacZ construct,
low-copy (SEQ ID NO: 243)

GGTACCcatttcctctcatcccatccggggtgagagtcttttcccccga
cttatggctcatgcatgcatcaaaaaagatgtgagcttgatcaaaaaca
aaaaatatttcactcgacaggagtatttatattgcgcccGGATCCctct
agaaataattttgtttaactttaagaaggagatatacatATGACTATGA
TTACGGATTCTCTGGCCGTCGTATTACAACGTCGTGACTGGGAAAACCC
TGGCGTTACCCAACTTAATCGCCTTGCGGCACATCCCCCTTTCGCCAGC
TGGCGTAATAGCGAAGAGGCCCGCACCGATCGCCCTTCCCAACAGTTGC
GCAGCCTGAATGGCGAATGGCGCTTTGCCTGGTTTCCGGCACCAGAAGC
GGTGCCGGAAAGCTGGCTGGAGTGCGATCTTCCTGACGCCGATACTGTC
GTCGTCCCCTCAAACTGGCAGATGCACGGTTACGATGCGCCTATCTACA
CCAACGTGACCTATCCCATTACGGTCAATCCGCCGTTTGTTCCCGCGGA
GAATCCGACAGGTTGTTACTCGCTCACATTTAATATTGATGAAAGCTGG
CTACAGGAAGGCCAGACGCGAATTATTTTTGATGGCGTTAACTCGGCGT
TTCATCTGTGGTGCAACGGGCGCTGGGTCGGTTACGGCCAGGACAGCCG
TTTGCCGTCTGAATTTGACCTGAGCGCATTTTTACGCGCCGGAGAAAAC
CGCCTCGCGGTGATGGTGCTGCGCTGGAGTGACGGCAGTTATCTGGAAG
ATCAGGATATGTGGCGGATGAGCGGCATTTTCCGTGACGTCTCGTTGCT
GCATAAACCGACCACGCAAATCAGCGATTTCCAAGTTACCACTCTCTTT
AATGATGATTTCAGCCGCGCGGTACTGGAGGCAGAAGTTCAGATGTACG
GCGAGCTGCGCGATGAACTGCGGGTGACGGTTTCTTTGTGGCAGGGTGA
AACGCAGGTCGCCAGCGGCACCGCGCCTTTCGGCGGTGAAATTATCGAT
GAGCGTGGCGGTTATGCCGATCGCGTCACACTACGCCTGAACGTTGAAA
ATCCGGAACTGTGGAGCGCCGAAATCCCGAATCTCTATCGTGCAGTGGT
TGAACTGCACACCGCCGACGGCACGCTGATTGAAGCAGAAGCCTGCGAC
GTCGGTTTCCGCGAGGTGCGGATTGAAAATGGTCTGCTGCTGCTGAACG
GCAAGCCGTTGCTGATTCGCGGCGTTAACCGTCACGAGCATCATCCTCT
GCATGGTCAGGTCATGGATGAGCAGACGATGGTGCAGGATATCCTGCTG
ATGAAGCAGAACAACTTTAACGCCGTGCGCTGTTCGCATTATCCGAACC
ATCCGCTGTGGTACACGCTGTGCGACCGCTACGGCCTGTATGTGGTGGA
TGAAGCCAATATTGAAACCCACGGCATGGTGCCAATGAATCGTCTGACC
GATGATCCGCGCTGGCTACCCGCGATGAGCGAACGCGTAACGCGGATGG
TGCAGCGCGATCGTAATCACCCGAGTGTGATCATCTGGTCGCTGGGGAA
TGAATCAGGCCACGGCGCTAATCACGACGCGCTGTATCGCTGGATCAAA
TCTGTCGATCCTTCCCGCCCGGTACAGTATGAAGGCGGCGGAGCCGACA
CCACGGCCACCGATATTATTTGCCCGATGTACGCGCGCGTGGATGAAGA
CCAGCCCTTCCCGGCGGTGCCGAAATGGTCCATCAAAAAATGGCTTTCG
CTGCCTGGAGAAATGCGCCCGCTGATCCTTTGCGAATATGCCCACGCGA
TGGGTAACAGTCTTGGCGGCTTCGCTAAATACTGGCAGGCGTTTCGTCA
GTACCCCCGTTTACAGGGCGGCTTCGTCTGGGACTGGGTGGATCAGTCG
CTGATTAAATATGATGAAAACGGCAACCCGTGGTCGGCTTACGGCGGTG
ATTTTGGCGATACGCCGAACGATCGCCAGTTCTGTATGAACGGTCTGGT
CTTTGCCGACCGCACGCCGCATCCGGCGCTGACGGAAGCAAAACACCAA
CAGCAGTATTTCCAGTTCCGTTTATCCGGGCGAACCATCGAAGTGACCA
GCGAATACCTGTTCCGTCATAGCGATAACGAGTTCCTGCACTGGATGGT
GGCACTGGATGGCAAGCCGCTGGCAAGCGGTGAAGTGCCTCTGGATGTT
GGCCCGCAAGGTAAGCAGTTGATTGAACTGCCTGAACTGCCGCAGCCGG
AGAGCGCCGGACAACTCTGGCTAACGGTACGCGTAGTGCAACCAAACGC
GACCGCATGGTCAGAAGCCGGACACATCAGCGCCTGGCAGCAATGGCGT
CTGGCGGAAAACCTCAGCGTGACACTCCCCTCCGCGTCCCACGCCATCC
CTCAACTGACCACCAGCGGAACGGATTTTTGCATCGAGCTGGGTAATAA
GCGTTGGCAATTTAACCGCCAGTCAGGCTTTCTTTCACAGATGTGGATT
GGCGATGAAAAACAACTGCTGACCCCGCTGCGCGATCAGTTCACCCGTG
CGCCGCTGGATAACGACATTGGCGTAAGTGAAGCGACCCGCATTGACCC
TAACGCCTGGGTCGAACGCTGGAAGGCGGCGGGCCATTACCAGGCCGAA
GCGGCGTTGTTGCAGTGCACGGCAGATACACTTGCCGACGCGGTGCTGA
TTACAACCGCCCACGCGTGGCAGCATCAGGGGAAAACCTTATTTATCAG
CCGGAAAACCTACCGGATTGATGGGCACGGTGAGATGGTCATCAATGTG
GATGTTGCGGTGGCAAGCGATACACCGCATCCGGCGCGGATTGGCCTGA
CCTGCCAGCTGGCGCAGGTCTCAGAGCGGGTAAACTGGCTCGGCCTGGG
GCCGCAAGAAAACTATCCCGACCGCCTTACTGCAGCCTGTTTTGACCGC
TGGGATCTGCCATTGTCAGACATGTATACCCCGTACGTCTTCCCGAGCG
AAAACGGTCTGCGCTGCGGGACGCGCGAATTGAATTATGGCCCACACCA
GTGGCGCGGCGACTTCCAGTTCAACATCAGCCGCTACAGCCAACAACAA
CTGATGGAAACCAGCCATCGCCATCTGCTGCACGCGGAAGAAGGCACAT
GGCTGAATATCGACGGTTTCCATATGGGGATTGGTGGCGACGACTCCTG
GAGCCCGTCAGTATCGGCGGAATTCCAGCTGAGCGCCGGTCGCTACCAT
TACCAGTTGGTCTGGTGTCAAAAATAA

TABLE 76
Pfnrs-lacZ construct Sequences
Nucleotide sequences of Pfnrs-lacZ construct,
low-copy (SEQ ID NO: 244)
GGTACCagttgttcttattggtggtgttgctttatggttgcatcgtagt
aaatggttgtaacaaaagcaatttttccggctgtctgtatacaaaaacg
ccgtaaagtttgagcgaagtcaataaactctctacccattcagggcaat
atctctcttGGATCCctctagaaataattttgtttaactttaagaagga
gatatacatATGCTATGATTACGGATTCTCTGGCCGTCGTATTACAACG
TCGTGACTGGGAAAACCCTGGCGTTACCCAACTTAATCGCCTTGCGGCA
CATCCCCCTTTCGCCAGCTGGCGTAATAGCGAAGAGGCCCGCACCGATC
GCCCTTCCCAACAGTTGCGCAGCCTGAATGGCGAATGGCGCTTTGCCTG
GTTTCCGGCACCAGAAGCGGTGCCGGAAAGCTGGCTGGAGTGCGATCTT
CCTGACGCCGATACTGTCGTCGTCCCCTCAAACTGGCAGATGCACGGTT
ACGATGCGCCTATCTACACCAACGTGACCTATCCCATTACGGTCAATCC
GCGTTTGTTCCCGCGGAGAATCCGACAGGTTGTTACTCGCTCACATTTA
ATATTGATGAAAGCTGGCTACAGGAAGGCCAGACGCGAATTATTTTTGA
TGGCGTTAACTCGGCGTTTCATCTGTGGTGCAACGGGCGCTGGGTCGGT
TACGGCCAGGACAGCCGTTTGCCGTCTGAATTTGACCTGAGCGCATTTT
TACGCGCCGGAGAAAACCGCCTCGCGGTGATGGTGCTGCGCTGGAGTGA
CGGCAGTTATCTGGAAGATCAGGATATGTGGCGGATGAGCGGCATTTTC
CGTGACGTCTCGTTGCTGCATAAACCGACCACGCAAATCAGCGATTTCC
AAGTTACCACTCTCTTTAATGATGATTTCAGCCGCGCGGTACTGGAGGC
AGAAGTTCAGATGTACGGCGAGCTGCGCGATGAACTGCGGGTGACGGTT
TCTTTGTGGCAGGGTGAAACGCAGGTCGCCAGCGGCACCGCGCCTTTCG
GCGGTGAAATTATCGATGAGCGTGGCGGTTATGCCGATCGCGTCACACT
ACGCCTGAACGTTGAAAATCCGGAACTGTGGAGCGCCGAAATCCCGAAT
CTCTATCGTGCAGTGGTTGAACTGCACACCGCCGACGGCACGCTGATTG
AAGCAGAAGCCTGCGACGTCGGTTTCCGCGAGGTGCGGATTGAAAATGG
TCTGCTGCTGCTGAACGGCAAGCCGTTGCTGATTCGCGGCGTTAACCGT
CACGAGCATCATCCTCTGCATGGTCAGGTCATGGATGAGCAGACGATGG
TGCAGGATATCCTGCTGATGAAGCAGAACAACTTTAACGCCGTGCGCTG
TTCGCATTATCCGAACCATCCGCTGTGGTACACGCTGTGCGACCGCTAC
GGCCTGTATGTGGTGGATGAAGCCAATATTGAAACCCACGGCATGGTGC
CAATGAATCGTCTGACCGATGATCCGCGCTGGCTACCCGCGATGAGCGA
ACGCGTAACGCGGATGGTGCAGCGCGATCGTAATCACCCGAGTGTGATC
ATCTGGTCGCTGGGGAATGAATCAGGCCACGGCGCTAATCACGACGCGC
TGTATCGCTGGATCAAATCTGTCGATCCTTCCCGCCCGGTACAGTATGA
AGGCGGCGGAGCCGACACCACGGCCACCGATATTATTTGCCCGATGTAC
GCGCGCGTGGATGAAGACCAGCCCTTCCCGGCGGTGCCGAAATGGTCCA
TCAAAAAATGGCTTTCGCTGCCTGGAGAAATGCGCCCGCTGATCCTTTG
CGAATATGCCCACGCGATGGGTAACAGTCTTGGCGGCTTCGCTAAATAC
TGGCAGGCGTTTCGTCAGTACCCCCGTTTACAGGGCGGCTTCGTCTGGG
ACTGGGTGGATCAGTCGCTGATTAAATATGATGAAAACGGCAACCCGTG
GTCGGCTTACGGCGGTGATTTTGGCGATACGCCGAACGATCGCCAGTTC
TGTATGAACGGTCTGGTCTTTGCCGACCGCACGCCGCATCCGGCGCTGA
CGGAAGCAAAACACCAACAGCAGTATTTCCAGTTCCGTTTATCCGGGCG
AACCATCGAAGTGACCAGCGAATACCTGTTCCGTCATAGCGATAACGAG
TTCCTGCACTGGATGGTGGCACTGGATGGCAAGCCGCTGGCAAGCGGTG
AAGTGCCTCTGGATGTTGGCCCGCAAGGTAAGCAGTTGATTGAACTGCC
TGAACTGCCGCAGCCGGAGAGCGCCGGACAACTCTGGCTAACGGTACGC
GTAGTGCAACCAAACGCGACCGCATGGTCAGAAGCCGGACACATCAGCG
CCTGGCAGCAATGGCGTCTGGCGGAAAACCTCAGCGTGACACTCCCCTC
CGCGTCCCACGCCATCCCTCAACTGACCACCAGCGGAACGGATTTTTGC
ATCGAGCTGGGTAATAAGCGTTGGCAATTTAACCGCCAGTCAGGCTTTC
TTTCACAGATGTGGATTGGCGATGAAAAACAACTGCTGACCCCGCTGCG
CGATCAGTTCACCCGTGCGCCGCTGGATAACGACATTGGCGTAAGTGAA
GCGACCCGCATTGACCCTAACGCCTGGGTCGAACGCTGGAAGGCGGCGG
GCCATTACCAGGCCGAAGCGGCGTTGTTGCAGTGCACGGCAGATACACT
TGCCGACGCGGTGCTGATTACAACCGCCCACGCGTGGCAGCATCAGGGG
AAAACCTTATTTATCAGCCGGAAAACCTACCGGATTGATGGGCACGGTG
AGATGGTCATCAATGTGGATGTTGCGGTGGCAAGCGATACACCGCATCC
GGCGCGGATTGGCCTGACCTGCCAGCTGGCGCAGGTCTCAGAGCGGGTA
AACTGGCTCGGCCTGGGGCCGCAAGAAAACTATCCCGACCGCCTTACTG
CAGCCTGTTTTGACCGCTGGGATCTGCCATTGTCAGACATGTATACCCC
GTACGTCTTCCCGAGCGAAAACGGTCTGCGCTGCGGGACGCGCGAATTG
AATTATGGCCCACACCAGTGGCGCGGCGACTTCCAGTTCAACATCAGCC
GCTACAGCCAACAACAACTGATGGAAACCAGCCATCGCCATCTGCTGCA
CGCGGAAGAAGGCACATGGCTGAATATCGACGGTTTCCATATGGGGATT
GGTGGCGACGACTCCTGGAGCCCGTCAGTATCGGCGGAATTCCAGCTGA
GCGCCGGTCGCTACCATTACCAGTTGGTCTGGTGTCAAAAATAA

### Example 32. Nitric Oxide-Inducible Reporter Constructs

[1435] ATC and nitric oxide-inducible reporter constructs were synthesized (Genewiz, Cambridge, Mass.). When induced by their cognate inducers, these constructs express GFP, which is detected by monitoring fluorescence in a plate reader at an excitation/emission of 395/509 nm, respectively. Nissle cells harboring plasmids with either the control, ATC-inducible Ptet-GFP reporter construct, or the nitric oxide inducible PnsrR-GFP reporter construct were first grown to early log phase (OD600 of about 0.4-0.6), at which point they were transferred to 96-well microtiter plates containing LB and two-fold decreased inducer (ATC or the long half-life NO donor, DETA-NO (Sigma)). Both ATC and NO were able to induce the expression of GFP in their respective constructs across a range of concentrations, as shown in the figures; promoter activity is expressed as relative florescence units. An exemplary sequence of a nitric oxide-inducible reporter construct is shown. The bsrR sequence is bolded. The gfp sequence is underlined. The PnsrR (NO regulated promoter and RBS) is italicized. The constitutive promoter and RBS are [symbol] .

TABLE 77
SEQ ID NO: 245

SEQ ID NO: 245
ttattatcgcaccgcaatcgggattttcgattcataaagcaggtcgtaggtcggcttgtt
gagcaggtcttgcagcgtgaaaccgtccagatacgtgaaaaacgacttcattgcaccgcc
gagtatgcccgtcagccggcaggacggcgtaatcaggcattcgttgttcgggcccataca
ctcgaccagctgcatcggttcgaggtggcggacgaccgcgccgatattgatgcgttcggg
cggcgcggccagcctcagcccgccgcctttcccgcgtacgctgtgcaagaacccgccttt
gaccagcgcggtaaccactttcatcaaatggcttttggaaatgccgtaggtcgaggcgat
ggtggcgatattgaccagcgcgtcgtcgttgacggcggtgtagatgaggacgcgcagccc

[chemical structure]

[chemical structure]

[chemical structure]

caattaatcatcggctcgtataatgtataacattcatattttgtgaattttaaactctag
aaataattttgtttaactttaagaaggagatatacatatggctagcaaaggcgaagaatt
gttcacgggcgttgttcctattttggttgaattggatggcgatgttaatggccataaatt
cagcgttagcggcgaaggcgaaggcgatgctacgtatggcaaattgacgttgaaattcat
ttgtacgacgggcaaattgcctgttccttggcctacgttggttacgacgttcagctatgg
cgttcaatgtttcagccgttatcctgatcatatgaaacgtcatgatttcttcaaaagcgc
tatgcctgaaggctatgttcaagaacgtacgattagcttcaaagatgatggcaattataa
aacgcgtgctgaagttaaattcgaaggcgatacgttggttaatcgtattgaattgaaagg
cattgatttcaaagaagatggcaatattttgggccataaattggaatataattataatag
ccataatgtttatattacggctgataaacaaaaaaatggcattaaagctaatttcaaaat
tcgtcataatattgaagatggcagcgttcaattggctgatcattatcaacaaaatacgcc
tattggcgatggccctgttttgttgcctgataatcattatttgagcacgcaaagcgcttt
gagcaaagatcctaatgaaaaacgtgatcatatggttttgttggaattcgttacggctgc
tggcattacgcatggcatggatgaattgtataaataataa

[1436] These constructs, when induced by their cognate inducer, lead to high level expression of GFP, which is detected by monitoring fluorescence in a plate reader at an excitation/emission of 395/509 nm, respectively. Nissle cells harboring plasmids with either the ATC-inducible Ptet-GFP reporter construct or the nitric oxide inducible PnsrR-GFP reporter construct were first grown to early log phase (OD600=˜0.4-0.6), at which point they were transferred to 96-well microtiter plates containing LB and 2-fold decreases in inducer (ATC or the long half-life NO donor, DETA-NO (Sigma)). It was observed that both the ATC and NO were able to induce the expression of GFP in their respective construct across a wide range of concentrations. Promoter activity is expressed as relative florescence units.

[1437] FIG. 63D NO-GFP constructs (the dot blot) E. coli Nissle harboring the nitric oxide inducible NsrR-GFP reporter fusion were grown overnight in LB supplemented with kanamycin. Bacteria were then diluted 1:100 into LB containing kanamycin and grown to an optical density of 0.4-0.5 and then pelleted by centrifugation. Bacteria were resuspended in phosphate buffered saline and 100 microliters were administered by oral gavage to mice. IBD is induced in mice by supplementing drinking water with 2-3% dextran sodium sulfate for 7 days prior to bacterial gavage. At 4 hours post-gavage, mice were sacrificed and bacteria were recovered from colonic samples. Colonic contents were boiled in SDS, and the soluble fractions were used to perform a dot blot for GFP detection (induction of NsrR-regulated promoters). Detection of GFP was performed by binding of anti-GFP antibody conjugated to HRP (horse radish peroxidase). Detection was visualized using Pierce chemiluminescent detection kit. It is shown in the figure that NsrR-regulated promoters are induced in DSS-treated mice, but are not shown to be induced in untreated mice. This is consistent with the role of NsrR in response to NO, and thus inflammation.

[1438] Bacteria harboring a plasmid expressing NsrR under control of a constitutive promoter and the reporter gene gfp (green fluorescent protein) under control of an NsrR-inducible promoter were grown overnight in LB supplemented with kanamycin. Bacteria are then diluted 1:100 into LB containing kanamycin and grown to an optical density of about 0.4-0.5 and then pelleted by centrifugation. Bacteria are resuspended in phosphate buffered saline and 100 microliters were administered by oral gavage to mice. IBD is induced in mice by supplementing drinking water with 2-3% dextran sodium sulfate for 7 days prior to bacterial gavage. At 4 hours post-gavage, mice were sacrificed and bacteria were recovered from colonic samples. Colonic contents were boiled in SDS, and the soluble fractions were used to perform a dot blot for GFP detection (induction of NsrR-regulated promoters) Detection of GFP was performed by binding of anti-GFP antibody conjugated to to HRP (horse radish peroxidase). Detection was visualized using Pierce chemiluminescent detection kit. The figures shows NsrR-regulated promoters are induced in DSS-treated mice, but not in untreated mice.

### Example 33. Generation of ΔThyA

[1439] An auxotrophic mutation causes bacteria to die in the absence of an exogenously added nutrient essential for survival or growth because they lack the gene(s) necessary to produce that essential nutrient. In order to generate genetically engineered bacteria with an auxotrophic modification, the thyA, a gene essential for oligonucleotide synthesis was deleted. Deletion of the thyA gene in E. coli Nissle yields a strain that cannot form a colony on LB plates unless they are supplemented with thymidine.

[1440] A thyA::cam PCR fragment was amplified using 3 rounds of PCR as follows. Sequences of the primers used at a 100 um concentration are found in Table 78.

TABLE 78
Primer Sequences

| | | | SEQ ID |
|---|---|---|---|
| Name | Sequence | Description | NO |
| SR36 | tagaactgatgcaaaaagtgctcgacgaaggcacacagaTGTGTAGG | Round 1: binds | SEQ ID |
| | CTGGAGCTGCTTC | on pKD3 | NO: 246 |
| SR38 | gtttcgtaattagatagccaccggcgctttaatgcccggaCATATGAAT | Round 1: binds | SEQ ID |
| | ATCCTCCTTAG | on pKD3 | NO: 247 |
| SR33 | caacacgtttcctgaggaaccatgaaacagtatttagaact | Round 2: binds to | SEQ ID |
| | gatgcaaaaag | round 1 PCR | NO: 248 |
| | | product | |
| SR34 | cgcacactggcgtcggctctggcaggatgtttcgtaattagatagc | Round 2: binds to | SEQ ID |
| | | round 1 PCR | NO: 249 |
| | | product | |
| SR43 | atatcgtcgcagcccacagcaacacgtttcctgagg | Round 3: binds to | SEQ ID |
| | | round 2 PCR | NO: 250 |
| | | product | |
| SR44 | aagaatttaacggagggcaaaaaaaaccgacgcacactggcgtcggc | Round 3: binds to | SEQ ID |
| | | round 2 PCR | NO: 251 |
| | | product | |

[1441] For the first PCR round, 4×50 ul PCR reactions containing 1 ng pKD3 as template, 25 ul 2×phusion, 0.2 ul primer SR36 and SR38, and either 0, 0.2, 0.4 or 0.6 ul DMSO were brought up to 50 ul volume with nuclease free water and amplified under the following cycle conditions:

[1442] step1: 98c for 30 s

[1443] step2: 98c for 10 s

[1444] step3: 55c for 15 s

[1445] step4: 72c for 20 s

[1446] repeat step 2-4 for 30 cycles

[1447] step5: 72c for 5 min

[1448] Subsequently, 5 ul of each PCR reaction was run on an agarose gel to confirm PCR product of the appropriate size. The PCR product was purified from the remaining PCR reaction using a Zymoclean gel DNA recovery kit according to the manufacturer's instructions and eluted in 30 ul nuclease free water.

[1449] For the second round of PCR, 1 ul purified PCR product from round 1 was used as template, in 4×50 ul PCR reactions as described above except with 0.2 ul of primers SR33 and SR34. Cycle conditions were the same as noted above for the first PCR reaction. The PCR product run on an agarose gel to verify amplification, purified, and eluted in 30 ul as described above.

[1450] For the third round of PCR, 1 ul of purified PCR product from round 2 was used as template in 4×50 ul PCR reactions as described except with primer SR43 and SR44. Cycle conditions were the same as described for rounds 1 and 2. Amplification was verified, the PCR product purified, and eluted as described above. The concentration and purity was measured using a spectrophotometer. The resulting linear DNA fragment, which contains 92 bp homologous to upstream of thyA, the chloramphenicol cassette flanked by frt sites, and 98 bp homologous to downstream of the thyA gene, was transformed into a E. coli Nissle 1917 strain containing pKD46 grown for recombineering. Following electroporation, 1 ml SOC medium containing 3 mM thymidine was added, and cells were allowed to recover at 37 C for 2 h with shaking. Cells were then pelleted at 10,000×g for 1 minute, the supernatant was discarded, and the cell pellet was resuspended in 100 ul LB containing 3 mM thymidine and spread on LB agar plates containing 3 mM thy and 20 ug/ml chloramphenicol. Cells were incubated at 37 C overnight. Colonies that appeared on LB plates were restreaked. +cam 20 ug/ml+ or −thy 3 mM. (thyA auxotrophs will only grow in media supplemented with thy 3 mM).

[1451] Next, the antibiotic resistance was removed with pCP20 transformation. pCP20 has the yeast Flp recombinase gene, FLP, chloramphenicol and ampicillin resistant genes, and temperature sensitive replication. Bacteria were grown in LB media containing the selecting antibiotic at 37° C. until OD600=0.4-0.6. 1 mL of cells were washed as follows: cells were pelleted at 16,000×g for 1 minute. The supernatant was discarded and the pellet was resuspended in 1 mL ice-cold 10% glycerol. This wash step was repeated 3× times. The final pellet was resuspended in 70 ul ice-cold 10% glycerol. Next, cells were electroporated with 1 ng pCP20 plasmid DNA, and 1 mL SOC supplemented with 3 mM thymidine was immediately added to the cuvette. Cells were resuspended and transferred to a culture tube and grown at 30° C. for 1 hours. Cells were then pelleted at 10,000×g for 1 minute, the supernatant was discarded, and the cell pellet was resuspended in 100 ul LB containing 3 mM thymidine and spread on LB agar plates containing 3 mM thy and 100 ug/ml carbenicillin and grown at 30° C. for 16-24 hours. Next, transformants were colony purified non-selectively (no antibiotics) at 42° C.

[1452] To test the colony-purified transformants, a colony was picked from the 42° C. plate with a pipette tip and resuspended in 10 μL LB. 3 μL of the cell suspension was pipetted onto a set of 3 plates: Cam, (37° C.; tests for the presence/absence of CamR gene in the genome of the host strain), Amp, (30° C., tests for the presence/absence of AmpR from the pCP20 plasmid) and LB only (desired cells that have lost the chloramphenicol cassette and the pCP20 plasmid), 37° C. Colonies were considered cured if there is no growth in neither the Cam or Amp plate, picked, and re-streaked on an LB plate to get single colonies, and grown overnight at 37° C.

### Example 34. Nissle Residence

[1453] Unmodified E. coli Nissle and the genetically engineered bacteria of the invention may be destroyed, e.g., by defense factors in the gut or blood serum. The residence time of bacteria in vivo may be calculated. A non-limiting example using a streptomycin-resistant strain of E. coli Nissle is described below. In alternate embodiments, residence time is calculated for the genetically engineered bacteria of the invention.

[1454] C57BL/6 mice were acclimated in the animal facility for 1 week. After one week of acclimation (i.e., day 0), streptomycin-resistant Nissle (SYN-UCD103) was administered to the mice via oral gavage on days 1-3. Mice were not pre-treated with antibiotic. The amount of bacteria administered, i.e., the inoculant, is shown in Table 79. In order to determine the CFU of the inoculant, the inoculant was serially diluted, and plated onto LB plates containing streptomycin (300 μg/mL). The plates were incubated at 37° C. overnight, and colonies were counted.

TABLE 79
CFU administered via oral gavage
CFU administered via oral gavage

| Strain | Day 1 | Day 2 | Day 3 |
|---|---|---|---|
| SYN-UCD103 | 1.30E+08 | 8.50E+08 | 1.90E+09 |

[1455] On days 2-10, fecal pellets were collected from up to 6 mice (ID NOs. 1-6; Table 80). The pellets were weighed in tubes containing PBS and homogenized. In order to determine the CFU of Nissle in the fecal pellet, the homogenized fecal pellet was serially diluted, and plated onto LB plates containing streptomycin (300 μg/mL). The plates were incubated at 37° C. overnight, and colonies were counted.

[1456] Fecal pellets from day 1 were also collected and plated on LB plates containing streptomycin (300 μg/mL) to determine if there were any strains native to the mouse gastrointestinal tract that were streptomycin resistant. The time course and amount of administered Nissle still residing within the mouse gastrointestinal tract is shown in Table 80.

[1457] FIG. 69 depicts a graph of Nissle residence in vivo. Streptomycin-resistant Nissle was administered to mice via oral gavage without antibiotic pre-treatment. Fecal pellets from six total mice were monitored post-administration to determine the amount of administered Nissle still residing within the mouse gastrointestinal tract. The bars represent the number of bacteria administered to the mice. The line represents the number of Nissle recovered from the fecal samples each day for 10 consecutive days.

TABLE 80
Nissle residence in vivo

| ID | Day 2 | Day 3 | Day 4 | Day 5 |
|---|---|---|---|---|
| 1 | 2.40E+05 | 6.50E+03 | 6.00E+04 | 2.00E+03 |
| 2 | 1.00E+05 | 1.00E+04 | 3.30E+04 | 3.00E+03 |
| 3 | 6.00E+04 | 1.70E+04 | 6.30E+04 | 2.00E+02 |
| 4 | 3.00E+04 | 1.50E+04 | 1.10E+05 | 3.00E+02 |
| 5 | | 1.00E+04 | 3.00E+05 | 1.50E+04 |
| 6 | | 1.00E+06 | 4.00E+05 | 2.30E+04 |
| Avg | 1.08E+05 | 1.76E+05 | 1.61E+05 | 7.25E+03 |

| ID | Day 6 | Day 7 | Day 8 | Day 9 | Day 10 |
|---|---|---|---|---|---|
| 1 | 9.10E+03 | 1.70E+03 | 4.30E+03 | 6.40E+03 | 2.77E+03 |
| 2 | 6.00E+03 | 7.00E+02 | 6.00E+02 | 0.00E+00 | 0.00E+00 |
| 3 | 1.00E+02 | 2.00E+02 | 0.00E+00 | 0.00E+00 | 0.00E+00 |
| 4 | 1.50E+03 | 1.00E+02 | | 0.00E+00 | 0.00E+00 |
| 5 | 3.10E+04 | 3.60E+03 | | 0.00E+00 | 0.00E+00 |
| 6 | 1.50E+03 | 1.40E+03 | 4.20E+03 | 1.00E+02 | 0.00E+00 |
| Avg | 8.20E+03 | 1.28E+03 | 2.28E+03 | 1.08E+03 | 4.62E+02 |

### Example 35. Intestinal Residence and Survival of Bacterial Strains In Vivo

[1458] Localization and intestinal residence time of streptomycin resistant Nissle, FIG. 70, was determined. Mice were gavaged, sacrificed at various time points, and effluents were collected from various areas of the small intestine cecum and colon.

[1459] Bacterial cultures were grown overnight and pelleted. The pellets were resuspended in PBS at a final concentration of approximately 10¹⁰ CFU/mL. Mice (C57BL6/J, 10-12 weeks old) were gavaged with 100 μL of bacteria (approximately 10⁹ CFU). Drinking water for the mice was changed to contain 0.1 mg/mL anhydrotetracycline (ATC) and 5% sucrose for palatability. At each timepoint (1, 4, 8, 12, 24, and 30 hours post-gavage), animals (n=4) were euthanized, and intestine, cecum, and colon were removed. The small intestine was cut into three sections, and the large intestine and colon each into two sections. Each section was flushed with 0.5 ml cold PBS and collected in separate 1.5 ml tubes. The cecum was harvested, contents were squeezed out, and flushed with 0.5 ml cold PBS and collected in a 1.5 ml tube. Intestinal effluents were placed on ice for serial dilution plating.

[1460] In order to determine the CFU of bacteria in each effluent, the effluent was serially diluted, and plated onto LB plates containing kanamycin. The plates were incubated at 37° C. overnight, and colonies were counted. The amount of bacteria and residence time in each compartment is shown in FIG. 70.

### Example 36. Efficacy of Butyrate-Expressing Bacteria in a Mouse Model of IBD

[1461] Bacteria harboring the butyrate cassettes described above are grown overnight in LB. Bacteria are then diluted 1:100 into LB containing a suitable selection marker, e.g., ampicillin, and grown to an optical density of 0.4-0.5 and then pelleted by centrifugation. Bacteria are resuspended in phosphate buffered saline and 100 microliters is administered by oral gavage to mice. IBD is induced in mice by supplementing drinking water with 3% dextran sodium sulfate for 7 days prior to bacterial gavage. Mice are treated daily for 1 week and bacteria in stool samples are detected by plating stool homogenate on agar plates supplemented with a suitable selection marker, e.g., ampicillin. After 5 days of bacterial treatment, colitis is scored in live mice using endoscopy. Endoscopic damage score is determined by assessing colon translucency, fibrin attachment, mucosal and vascular pathology, and/or stool characteristics. Mice are sacrificed and colonic tissues are isolated. Distal colonic sections are fixed and scored for inflammation and ulceration. Colonic tissue is homogenized and measurements are made for myeloperoxidase activity using an enzymatic assay kit and for cytokine levels (IL-1β, TNF-α, IL-6, IFN-γ and IL-10).

### Example 37. Generating a DSS-Induced Mouse Model of IBD

[1462] The genetically engineered bacteria described in Example 1 can be tested in the dextran sodium sulfate (DSS)-induced mouse model of colitis. The administration of DSS to animals results in chemical injury to the intestinal epithelium, allowing proinflammatory intestinal contents (e.g., luminal antigens, enteric bacteria, bacterial products) to disseminate and trigger inflammation (Low et al., 2013). To prepare mice for DSS treatment, mice are labeled using ear punch, or any other suitable labeling method. Labeling individual mice allows the investigator to track disease progression in each mouse, since mice show differential susceptibilities and responsiveness to DSS induction. Mice are then weighed, and if required, the average group weight is equilibrated to eliminate any significant weight differences between groups. Stool is also collected prior to DSS administration, as a control for subsequent assays. Exemplary assays for fecal markers of inflammation (e.g., cytokine levels or myeloperoxidase activity) are described below.

[1463] For DSS administration, a 3% solution of DSS (MP Biomedicals, Santa Ana, Calif.; Cat. No. 160110) in autoclaved water is prepared. Cage water bottles are then filled with 100 mL of DSS water, and control mice are given the same amount of water without DSS supplementation. This amount is generally sufficient for 5 mice for 2-3 days. Although DSS is stable at room temperature, both types of water are changed every 2 days, or when turbidity in the bottles is observed.

[1464] Acute, chronic, and resolving models of intestinal inflammation are achieved by modifying the dosage of DSS (usually 1-5%) and the duration of DSS administration (Chassaing et al., 2014). For example, acute and resolving colitis may be achieved after a single continuous exposure to DSS over one week or less, whereas chronic colitis is typically induced by cyclical administration of DSS punctuated with recovery periods (e.g., four cycles of DSS treatment for 7 days, followed by 7-10 days of water).

[1465] FIG. 14D shows that butyrate produced in vivo in DSS mouse models under the control of an FNR promoter can be gut protective. LCN2 and calprotectin are both a measure of gut barrier disruption (measure by ELISA in this assay). FIG. 14D shows that SYN-501 (ter substitution) reduces inflammation and/or protects gut barrier as compared to wildtype Nissle.

### Example 38. Monitoring Disease Progression In Vivo

[1466] Following initial administration of DSS, stool is collected from each animal daily, by placing a single mouse in an empty cage (without bedding material) for 15-30 min. However, as DSS administration progresses and inflammation becomes more robust, the time period required for collection increases. Stool samples are collected using sterile forceps, and placed in a microfuge tube. A single pellet is used to monitor occult blood according to the following scoring system: 0, normal stool consistency with negative hemoccult; 1, soft stools with positive hemoccult; 2, very soft stools with traces of blood; and 3, watery stools with visible rectal bleeding. This scale is used for comparative analysis of intestinal bleeding. All remaining stool is reserved for the measurement of inflammatory markers, and frozen at −20° C.

[1467] The body weight of each animal is also measured daily. Body weights may increase slightly during the first three days following initial DSS administration, and then begin to decrease gradually upon initiation of bleeding. For mouse models of acute colitis, DSS is typically administered for 7 days. However, this length of time may be modified at the discretion of the investigator.

### Example 39. In Vivo Efficacy of Genetically Engineered Bacteria Following DSS Induction

[1468] The genetically engineered bacteria described in Example 1 can be tested in DSS-induced animal models of IBD. Bacteria are grown overnight in LB supplemented with the appropriate antibiotic. Bacteria are then diluted 1:100 in fresh LB containing selective antibiotic, grown to an optical density of 0.4-0.5, and pelleted by centrifugation. Bacteria are then resuspended in phosphate buffered saline (PBS). IBD is induced in mice by supplementing drinking water with 3% DSS for 7 days prior to bacterial gavage. On day 7 of DSS treatment, 100 μL of bacteria (or vehicle) is administered to mice by oral gavage. Bacterial treatment is repeated once daily for 1 week, and bacteria in stool samples are detected by plating stool homogenate on selective agar plates.

[1469] After 5 days of bacterial treatment, colitis is scored in live mice using the Coloview system (Karl Storz Veterinary Endoscopy, Goleta, Calif.). In mice under 1.5-2.0% isoflurane anesthesia, colons are inflated with air and approximately 3 cm of the proximal colon can be visualized (Chassaing et al., 2014). Endoscopic damage is scored by assessing colon translucency (score 0-3), fibrin attachment to the bowel wall (score 0-3), mucosal granularity (score 0-3), vascular pathology (score 0-3), stool characteristics (normal to diarrhea; score 0-3), and the presence of blood in the lumen (score 0-3), to generate a maximum score of 18. Mice are sacrificed and colonic tissues are isolated using protocols described in Examples 8 and 9. Distal colonic sections are fixed and scored for inflammation and ulceration. Remaining colonic tissue is homogenized and cytokine levels (e.g., IL-1β, TNF-α, IL-6, IFN-γ, and IL-10), as well as myeloperoxidase activity, are measured using methods described below.

### Example 40. Euthanasia Procedures for Rodent Models of IBD

[1470] Four and 24 hours prior to sacrifice, 5-bromo-2′-deooxyuridine (BrdU) (Invitrogen, Waltham, Mass.; Cat. No. B23151) may be intraperitoneally administered to mice, as recommended by the supplier. BrdU is used to monitor intestinal epithelial cell proliferation and/or migration via immunohistochemistry with standard anti-BrdU antibodies (Abcam, Cambridge, Mass.).

[1471] On the day of sacrifice, mice are deprived of food for 4 hours, and then gavaged with FITC-dextran tracer (4 kDa, 0.6 mg/g body weight). Fecal pellets are collected, and mice are euthanized 3 hours following FITC-dextran administration. Animals are then cardiac bled to collect hemolysis-free serum. Intestinal permeability correlates with fluorescence intensity of appropriately diluted serum (excitation, 488 nm; emission, 520 nm), and is measured using spectrophotometry. Serial dilutions of a known amount of FITC-dextran in mouse serum are used to prepare a standard curve.

[1472] Alternatively, intestinal inflammation is quantified according to levels of serum keratinocyte-derived chemokine (KC), lipocalin 2, calprotectin, and/or CRP-1. These proteins are reliable biomarkers of inflammatory disease activity, and are measured using DuoSet ELISA kits (R&D Systems, Minneapolis, Minn.) according to manufacturer's instructions. For these assays, control serum samples are diluted 1:2 or 1:4 for KC, and 1:200 for lipocalin 2. Samples from DSS-treated mice require a significantly higher dilution.

### Example 41. Isolation and Preservation of Colonic Tissues

[1473] To isolate intestinal tissues from mice, each mouse is opened by ventral midline incision. The spleen is then removed and weighed. Increased spleen weights generally correlate with the degree of inflammation and/or anemia in the animal. Spleen lysates (100 mg/mL in PBS) plated on non-selective agar plates are also indicative of disseminated intestinal bacteria. The extent of bacterial dissemination should be consistent with any FITC-dextran permeability data.

[1474] Mesenteric lymph nodes are then isolated. These may be used to characterize immune cell populations and/or assay the translocation of gut bacteria. Lymph node enlargement is also a reliable indicator of DSS-induced pathology. Finally, the colon is removed by lifting the organ with forceps and carefully pulling until the cecum is visible. Colon dissection from severely inflamed DSS-treated mice is particularly difficult, since the inflammatory process causes colonic tissue to thin, shorten, and attach to extraintestinal tissues.

[1475] The colon and cecum are separated from the small intestine at the ileocecal junction, and from the anus at the distal end of the rectum. At this point, the mouse intestine (from cecum to rectum) may be imaged for gross analysis, and colonic length may be measured by straightening (but not stretching) the colon. The colon is then separated from the cecum at the ileocecal junction, and briefly flushed with cold PBS using a 5- or 10-mL syringe (with a feeding needle). Flushing removes any feces and/or blood. However, if histological staining for mucin layers or bacterial adhesion/translocation is ultimately anticipated, flushing the colon with PBS should be avoided. Instead, the colon is immersed in Carnoy's solution (60% ethanol, 30% chloroform, 10% glacial acetic acid; Johansson et al., 2008) to preserve mucosal architecture. The cecum can be discarded, as DSS-induced inflammation is generally not observed in this region.

[1476] After flushing, colon weights are measured. Inflamed colons exhibit reduced weights relative to normal colons due to tissue wasting, and reductions in colon weight correlate with the severity of acute inflammation. In contrast, in chronic models of colitis, inflammation is often associated with increased colon weight. Increased weight may be attributed to focal collections of macrophages, epithelioid cells, and multinucleated giant cells, and/or the accumulation of other cells, such as lymphocytes, fibroblasts, and plasma cells (Williams and Williams, 1983).

[1477] To obtain colon samples for later assays, colons are cut into the appropriate number of pieces. It is important to compare the same region of the colon from different groups of mice when performing any assay. For example, the proximal colon is frozen at −80° C. and saved for MPO analysis, the middle colon is stored in RNA later and saved for RNA isolation, and the rectal region is fixed in 10% formalin for histology. Alternatively, washed colons may be cultured ex vivo. Exemplary protocols for each of these assays are described below.

### Example 42. Myeloperoxidase Activity Assay

[1478] Granulocyte infiltration in the rodent intestine correlates with inflammation, and is measured by the activity levels of myeloperoxidase, an enzyme abundantly expressed in neutrophil granulocytes. Myeloperoxidase (MPO) activity may be quantified using either o-dianisidine dihydrochloride (Sigma, St. Louis, Mo.; Cat. No. D3252) or 3,3′,5,5′-tetramethylbenzidine (Sigma; Cat. No. T2885) as a substrate.

[1479] Briefly, clean, flushed samples of colonic tissue (50-100 mg) are removed from storage at −80° C. and immediately placed on ice. Samples are then homogenized in 0.5% hexadecyltrimethylammonium bromide (Sigma; Cat. No. H6269) in 50 mM phosphate buffer, pH 6.0. Homogenates are then disrupted for 30 sec by sonication, snap-frozen in dry ice, and thawed for a total of three freeze-thaw cycles before a final sonication for 30 sec.

[1480] For assays with o-dianisidine dihydrochloride, samples are centrifuged for 6 min at high speed (13,400 g) at 4° C. MPO in the supernatant is then assayed in a 96-well plate by adding 1 mg/mL of o-dianisidine dihydrochloride and 0.5×10-4% H2O2, and measuring optical density at 450 nm. A brownish yellow color develops slowly over a period of 10-20 min; however, if color development is too rapid, the assay is repeated after further diluting the samples. Human neutrophil MPO (Sigma; Cat. No. M6908) is used as a standard, with a range of 0.5-0.015 units/mL. One enzyme unit is defined as the amount of enzyme needed to degrade 1.0 mol of peroxide per minute at 25° C. This assay is used to analyze MPO activity in rodent colonic samples, particularly in DSS-induced tissues.

[1481] For assays with 3,3′,5,5′-tetramethylbenzidine (TMB), samples are incubated at 60° C. for 2 hours and then spun down at 4,000 g for 12 min. Enzymatic activity in the supernatant is quantified photometrically at 630 nm. The assay mixture consists of 20 mL supernatant, 10 mL TMB (final concentration, 1.6 mM) dissolved in dimethylsulfoxide, and 70 mL H₂O₂ (final concentration, 3.0 mM) diluted in 80 mM phosphate buffer, pH 5.4. One enzyme unit is defined as the amount of enzyme that produces an increase of one absorbance unit per minute. This assay is used to analyze MPO activity in rodent colonic samples, particularly in tissues induced by trinitrobenzene (TNBS) as described herein.

### Example 43. RNA Isolation and Gene Expression Analysis

[1482] To gain further mechanistic insights into how the genetically engineered bacteria may reduce gut inflammation in vivo, gene expression is evaluated by semi-quantitative and/or real-time reverse transcription PCR.

[1483] For semi-quantitative analysis, total RNA is extracted from intestinal mucosal samples using the RNeasy isolation kit (Qiagen, Germantown, Md.; Cat. No. 74106). RNA concentration and purity are determined based on absorbency measurements at 260 and 280 nm. Subsequently, 1 μg of total RNA is reverse-transcribed, and cDNA is amplified for the following genes: tumor necrosis factor alpha (TNF-α), interferon-gamma (IFN-γ), interleukin-2 (IL-2), or any other gene associated with inflammation. Glyceraldehyde-3-phosphate dehydrogenase (GAPDH) is used as the internal standard. Polymerase chain reaction (PCR) reactions are performed with a 2-min melting step at 95° C., then 25 cycles of 30 sec at 94° C., 30 sec at 63° C., and 1 min at 75° C., followed by a final extension step of 5 min at 65° C. Reverse transcription (RT)-PCR products are separated by size on a 4% agarose gel and stained with ethidium bromide. Relative band intensities are analyzed using standard image analysis software.

[1484] For real-time, quantitative analysis, intestinal samples (50 mg) are stored in RNAlater solution (Sigma; Cat. No. R0901) until RNA extraction. Samples should be kept frozen at −20° C. for long-term storage. On the day of RNA extraction, samples are thawed, or removed from RNAlater, and total RNA is extracted using Trizol (Fisher Scientific, Waltham, Mass.; Cat. No. 15596026). Any suitable RNA extraction method may be used. When working with DSS-induced samples, it is necessary to remove all polysaccharides (including DSS) using the lithium chloride method (Chassaing et al., 2012). Traces of DSS in colonic tissues are known to interfere with PCR amplification in subsequent steps.

[1485] Primers are designed for various genes and cytokines associated with the immune response using Primer Express® software (Applied Biosystems, Foster City, Calif.). Following isolation of total RNA, reverse transcription is performed using random primers, dNTPs, and Superscript® II enzyme (Invitrogen; Ser. No. 18/064,014). cDNA is then used for real-time PCR with SYBR Green PCR Master Mix (Applied Biosystems; 4309155) and the ABI PRISM 7000 Sequence Detection System (Applied Biosystems), although any suitable detection method may be used. PCR products are validated by melt analysis.

### Example 44. Histology

[1486] Standard histological stains are used to evaluate intestinal inflammation at the microscopic level. Hematoxylin-eosin (H&E) stain allows visualization of the quality and dimension of cell infiltrates, epithelial changes, and mucosal architecture (Erben et al., 2014). Periodic Acid-Schiff (PAS) stain is used to stain for carbohydrate macromolecules (e.g., glycogen, glycoproteins, mucins). Goblet cells, for example, are PAS-positive due to the presence of mucin.

[1487] Swiss rolls are recommended for most histological stains, so that the entire length of the rodent intestine may be examined. This is a simple technique in which the intestine is divided into portions, opened longitudinally, and then rolled with the mucosa outwards (Moolenbeek and Ruitenberg, 1981). Briefly, individual pieces of colon are cut longitudinally, wrapped around a toothpick wetted with PBS, and placed in a cassette. Following fixation in 10% formalin for 24 hours, cassettes are stored in 70% ethanol until the day of staining. Formalin-fixed colonic tissue may be stained for BrdU using anti-BrdU antibodies (Abcam). Alternatively, Ki67 may be used to visualize epithelial cell proliferation. For stains using antibodies to more specific targets (e.g., immunohistochemistry, immunofluorescence), frozen sections are fixed in a cryoprotective embedding medium, such as Tissue-Tek® OCT (VWR, Radnor, Pa.; Cat. No. 25608-930).

[1488] For H&E staining, stained colonic tissues are analyzed by assigning each section four scores of 0-3 based on the extent of epithelial damage, as well as inflammatory infiltration into the mucosa, submucosa, and muscularis/serosa. Each of these scores is multiplied by: 1, if the change is focal; 2, if the change is patchy; and 3, if the change is diffuse. The four individual scores are then summed for each colon, resulting in a total scoring range of 0-36 per animal. Average scores for the control and affected groups are tabulated. Alternative scoring systems are detailed herein.

### Example 45. Ex Vivo Culturing of Rodent Colons

[1489] Culturing colons ex vivo may provide information regarding the severity of intestinal inflammation. Longitudinally-cut colons (approximately 1.0 cm) are serially washed three times in Hanks' Balanced Salt Solution with 1.0% penicillin/streptomycin (Fisher; Cat. No. BP295950). Washed colons are then placed in the wells of a 24-well plate, each containing 1.0 mL of serum-free RPMI 1640 medium (Fisher; Cat. No. 11875093) with 1.0% penicillin/streptomycin, and incubated at 37° C. with 5.0% CO2 for 24 hours. Following incubation, supernatants are collected and centrifuged for 10 min at 4° C. Supernatants are stored at −80° C. prior to analysis for proinflammatory cytokines.

### Example 46. In Vivo Efficacy of Genetically Engineered Bacteria Following TNBS Induction

[1490] Apart from DSS, the genetically engineered bacteria described in 1 can also be tested in other chemically induced animal models of IBD. Non-limiting examples include those induced by oxazolone (Boirivant et al., 1998), acetic acid (MacPherson and Pfeiffer, 1978), indomethacin (Sabiu et al., 2016), sulfhydryl inhibitors (Satoh et al., 1997), and trinitrobenzene sulfonic acid (TNBS) (Gurtner et al., 2003; Segui et al., 2004). To determine the efficacy of the genetically engineered bacteria in a TNBS-induced mouse model of colitis, bacteria are grown overnight in LB supplemented with the appropriate antibiotic. Bacteria are then diluted 1:100 in fresh LB containing selective antibiotic, grown to an optical density of 0.4-0.5, and pelleted by centrifugation. Bacteria are resuspended in PBS. IBD is induced in mice by intracolonic administration of 30 mg TNBS in 0.25 mL 50% (vol/vol) ethanol (Segui et al., 2004). Control mice are administered 0.25 mL saline. Four hours post-induction, 100 μL of bacteria (or vehicle) is administered to mice by oral gavage. Bacterial treatment is repeated once daily for 1 week. Animals are weighed daily.

[1491] After 7 days of bacterial treatment, mice are sacrificed via intraperitoneal administration of thiobutabarbital (100 mg/kg). Colonic tissues are isolated by blunt dissection, rinsed with saline, and weighed. Blood samples are collected by open cardiac puncture under aseptic conditions using a 1-mL syringe, placed in Eppendorf vials, and spun at 1,500 g for 10 min at 4° C. The supernatant serum is then pipetted into autoclaved Eppendorf vials and frozen at −80° C. for later assay of IL-6 levels using a quantitative, colorimetric commercial kit (R&D Systems).

[1492] Macroscopic damage is examined under a dissecting microscope by a blinded observer. An established scoring system is used to account for the presence/severity of intestinal adhesions (score 0-2), strictures (score 0-3), ulcers (score 0-3), and wall thickness (score 0-2) (Mourelle et al., 1996). Two colon samples (50 mg) are then excised, snap-frozen in liquid nitrogen, and stored at −80° C. for subsequent myeloperoxidase activity assay. If desired, additional samples are preserved in 10% formalin for histologic grading. Formalin-fixed colonic samples are then embedded in paraffin, and 5 μm sections are stained with H&E. Microscopic inflammation of the colon is assessed on a scale of 0 to 11, according to previously defined criteria (Appleyard and Wallace, 1995).

### Example 47. Generating a Cell Transfer Mouse Model of IBD

[1493] The genetically engineered bacteria described in Example 1 can be tested in cell transfer animal models of IBD. One exemplary cell transfer model is the CD45RBHi T cell transfer model of colitis (Bramhall et al., 2015; Ostanin et al., 2009; Sugimoto et al., 2008). This model is generated by sorting CD4+ T cells according to their levels of CD45RB expression, and adoptively transferring CD4+ T cells with high CD45RB expression (referred to as CD45RBHi T cells) from normal donor mice into immunodeficient mice (e.g., SCID or RAG−/− mice). Specific protocols are described below.

[1494] Enrichment for (714 T Cells

[1495] Following euthanization of C57BL/6 wild-type mice of either sex (Jackson Laboratories, Bar Harbor, Me.), mouse spleens are removed and placed on ice in a 100 mm Petri dish containing 10-15 mL of FACS buffer (IX PBS without Ca2+/Mg2+, supplemented with 4% fetal calf serum). Spleens are teased apart using two glass slides coated in FACS buffer, until no large pieces of tissue remain. The cell suspension is then withdrawn from the dish using a 10-mL syringe (no needle), and expelled out of the syringe (using a 26-gauge needle) into a 50-mL conical tube placed on ice. The Petri dish is washed with an additional 10 mL of FACS buffer, using the same needle technique, until the 50-mL conical tube is full. Cells are pelleted by centrifugation at 400 g for 10 min at 4° C. After the cell pellet is gently disrupted with a stream of FACS buffer, cells are counted. Cells used for counting are kept on ice and saved for single-color staining described in the next section. All other cells (i.e., those remaining in the 50-mL conical tube) are transferred to new 50-mL conical tubes. Each tube should contain a maximum of 25×10⁷ cells.

[1496] To enrich for CD4+ T cells, the Dynal® Mouse CD4 Negative Isolation kit (Invitrogen; Cat. No. 114-15D) is used as per manufacturer's instructions. Any comparable CD4+ T cell enrichment method may be used. Following negative selection, CD4+ cells remain in the supernatant. Supernatant is carefully pipetted into a new 50-mL conical tube on ice, and cells are pelleted by centrifugation at 400 g for 10 min at 4° C. Cell pellets from all 50-mL tubes are then resuspended, pooled into a single 15-mL tube, and pelleted once more by centrifugation. Finally, cells are resuspended in 1 mL of fresh FACS buffer, and stained with anti-CD4-APC and anti-CD45RB-FITC antibodies.

[1497] Fluorescent Labeling of CD4+ T Cells

[1498] To label CD4+ T cells, an antibody cocktail containing appropriate dilutions of pre-titrated anti-CD4-APC and anti-CD45RB-FITC antibodies in FACS buffer (approximately 1 mL cocktail/5×107 cells) is added to a 1.5-mL Eppendorf tube, and the volume is adjusted to 1 mL with FACS buffer. Antibody cocktail is then combined with cells in a 15-mL tube. The tube is capped, gently inverted to ensure proper mixing, and incubated on a rocking platform for 15 min at 4° C.

[1499] During the incubation period, a 96-well round-bottom staining plate is prepared by transferring equal aliquots of counted cells (saved from the previous section) into each well of the plate that corresponds to single-color control staining. These wells are then filled to 200 μL with FACs buffer, and the cells are pelleted at 300 g for 3 min at 4° C. using a pre-cooled plate centrifuge. Following centrifugation, the supernatant is discarded using a 21-gauge needle attached to a vacuum line, and 100 μL of anti-CD 16/32 antibody (Fc receptor-blocking) solution is added to each well to prevent non-specific binding. The plate is incubated on a rocking platform at 4° C. for 15 min. Cells are then washed with 200 μL FACS buffer and pelleted by centrifugation. Supernatant is aspirated, discarded, and 100 μL of the appropriate antibody (i.e., pre-titrated anti-CD4-APC or anti-CD45RB-FITC) is added to wells corresponding to each single-color control. Cells in unstained control wells are resuspended in 100 μL FACS buffer. The plate is incubated on a rocking platform at 4° C. for 15 min. After two washes, cells are resuspended in 200 μL of FACS buffer, transferred into twelve 75-mm flow tubes containing 150-200 μL of FACS buffer, and the tubes are placed on ice.

[1500] Following incubation, cells in the 15-mL tube containing antibody cocktail are pelleted by centrifugation at 400 g for 10 min at 4° C., and resuspended in FACS buffer to obtain a concentration of 25-50×10⁶ cells/mL.

[1501] Purification of CD4+ CD45RBHi T Cells

[1502] Cell sorting of CD45RBHi and CD45RBLow populations is performed using flow cytometry. Briefly, a sample of unstained cells is used to establish baseline autofluorescence, and for forward scatter vs. side scatter gating of lymphoid cells. Single-color controls are used to set the appropriate levels of compensation to apply to each fluorochrome. However, with FITC and APC fluorochromes, compensation is generally not required. A single-parameter histogram (gated on singlet lymphoid cells) is then used to gate CD4+ (APC+) singlet cells, and a second singlet-parameter (gated on CD4+ singlet cells) is collected to establish sort gates. The CD45RBHi population is defined as the 40% of cells which exhibit the brightest CD45RB staining, whereas the CD45RBLow population is defined as the 15% of cells with the dimmest CD45RB expression. Each of these populations is sorted individually, and the CD45RBHi cells are used for adoptive transfer.

[1503] Adoptive Transfer

[1504] Purified populations of CD4+ CD45RBHi cells are adoptively transferred into 6- to 8-week-old RAG−/− male mice. The collection tubes containing sorted cells are filled with FACS buffer, and the cells are pelleted by centrifugation. The supernatant is then discarded, and cells are resuspended in 500 μL PBS. Resuspended cells are transferred into an injection tube, with a maximum of 5×106 cells per tube, and diluted with cold PBS to a final concentration of 1×106 cells/mL. Injection tubes are kept on ice.

[1505] Prior to injection, recipient mice are weighed and injection tubes are gently inverted several times to mix the cells. Mixed cells (0.5 mL, ˜0.5×106 cells) are carefully drawn into a 1-mL syringe with a 26G3/8 needle attached. Cells are then intraperitoneally injected into recipient mice.

### Example 48. Efficacy of Genetically Engineered Bacteria in a CD45RBHi T Cell Transfer Model

[1506] To determine whether the genetically engineered bacteria of the disclosure are efficacious in CD45RBHi T cell transfer mice, disease progression following adoptive transfer is monitored by weighing each mouse on a weekly basis. Typically, modest weight increases are observed over the first 3 weeks post-transfer, followed by slow but progressive weight loss over the next 4-5 weeks. Weight loss is generally accompanied by the appearance of loose stools and diarrhea.

[1507] At weeks 4 or 5 post-transfer, as recipient mice begin to develop signs of disease, the genetically engineered bacteria described in Example 1 are grown overnight in LB supplemented with the appropriate antibiotic. Bacteria are then diluted 1:100 in fresh LB containing selective antibiotic, grown to an optical density of 0.4-0.5, and pelleted by centrifugation. Bacteria are resuspended in PBS and 100 μL of bacteria (or vehicle) is administered by oral gavage to CD45RBHi T cell transfer mice. Bacterial treatment is repeated once daily for 1-2 weeks before mice are euthanized. Murine colonic tissues are isolated and analyzed using the procedures described above.

### Example 49. Efficacy of Genetically Engineered Bacteria in a Genetic Mouse Model of IBD

[1508] The genetically engineered bacteria described in Example 1 can be tested in genetic (including congenic and genetically modified) animal models of IBD. For example, IL-10 is an anti-inflammatory cytokine and the gene encoding IL-10 is a susceptibility gene for both Crohn's disease and ulcerative colitis (Khor et al., 2011). Functional impairment of IL-10, or its receptor, has been used to create several mouse models for the study of inflammation (Bramhall et al., 2015). IL-10 knockout (IL-10−/−) mice housed under normal conditions develop chronic inflammation in the gut (Iyer and Cheng, 2012).

[1509] To determine whether the genetically engineered bacteria of the disclosure are efficacious in IL-10−/− mice, bacteria are grown overnight in LB supplemented with the appropriate antibiotic. Bacteria are then diluted 1:100 in fresh LB containing selective antibiotic, grown to an optical density of 0.4-0.5, and pelleted by centrifugation. Bacteria are resuspended in PBS and 100 μL of bacteria (or vehicle) is administered by oral gavage to IL-10−/− mice. Bacterial treatment is repeated once daily for 1-2 weeks before mice are euthanized. Murine colonic tissues are isolated and analyzed using the procedures described above.

[1510] Protocols for testing the genetically engineered bacteria are similar for other genetic animal models of IBD. Such models include, but are not limited to, transgenic mouse models, e.g., SAMP1/YitFc (Pizarro et al., 2011), dominant negative N-cadherin mutant (NCAD delta; Hermiston and Gordon, 1995), TNFΔΔRE (Wagner et al., 2013), IL-7 (Watanabe et al., 1998), C3H/HeJBir (Elson et al., 2000), and dominant negative TGF-β receptor II mutant (Zhang et al., 2010); and knockout mouse models, e.g., TCRα−/− (Mombaerts et al., 1993; Sugimoto et al., 2008), WASP−/− (Nguyen et al., 2007), Mdr1a−/− (Wilk et al., 2005), IL-2 Rα−/− (Hsu et al., 2009), Gαi2−/− (Ohman et al., 2002), and TRUC (Tbet−/−Rag2−/−; Garrett et al., 2007).

### Example 50. Efficacy of Genetically Engineered Bacteria in a Transgenic Rat Model of IBD

[1511] The genetically engineered bacteria described in Example 1 can be tested in non-murine animal models of IBD. The introduction of human leukocyte antigen B27 (HLA-B27) and the human β2-microglobulin gene into Fisher (F344) rats induces spontaneous, chronic inflammation in the GI tract (Alavi et al., 2000; Hammer et al., 1990). To investigate whether the genetically engineered bacteria of the invention are capable of ameliorating gut inflammation in this model, bacteria are grown overnight in LB supplemented with the appropriate antibiotic. Bacteria are then diluted 1:100 in fresh LB containing selective antibiotic, grown to an optical density of 0.4-0.5, and pelleted by centrifugation. Bacteria are resuspended in PBS and 100 μL of bacteria (or vehicle) is administered by oral gavage to transgenic F344-HLA-B27 rats. Bacterial treatment is repeated once daily for 2 weeks.

[1512] To determine whether bacterial treatment reduces the gross and histological intestinal lesions normally present in F344-HLA-B27 rats at 25 weeks of age, all animals are sacrificed at day 14 following the initial treatment. The GI tract is then resected from the ligament of Treitz to the rectum, opened along the antimesenteric border, and imaged using a flatbed scanner. Total mucosal damage, reported as a percent of the total surface area damaged, is quantified using standard image analysis software.

[1513] For microscopic analysis, samples (0.5-1.0 cm) are excised from both normal and diseased areas of the small and large intestine. Samples are fixed in formalin and embedded in paraffin before sections (5 lam) are processed for H&E staining. The stained sections are analyzed and scored as follows: 0, no inflammation; 1, mild inflammation extending into the submucosa; 2, moderate inflammation extending into the muscularis propria; and 3, severe inflammation. The scores are combined and reported as mean±standard error.

### Example 51. Synthesis of Constructs for Synthesis of Tryptophan, Tryptamine, and Other Indole Metabolites

[1514] Various constructs were synthesized, and cloned into vector pBR322 for transformation of E. coli. In some embodiments, the constructs encoding the effector molecules are integrated into the genome according to methods described herein, e.g., Example 2.

TABLE 81
Sequences

| Description | Sequence |
|---|---|
| fbrAroG (RBS and | Ctctagaaataattttgtttaactttaagaaggagatatacat |
| leader region | atgaattatcagaacgacgatttacgcatcaaagaaatcaaagagttacttcctcctgtcg |
| underlined) | cattgctggaaaaattccccgctactgaaaatgccgcgaatacggtcgcccatgcccga |
| SEQ ID NO: 255 | aaagcgatccataagatcctgaaaggtaatgatgatcgcctgttggtggtgattggccca |
| | tgctcaattcatgatcctgtcgcggctaaagagtatgccactcgcttgctgacgctgcgtg |
| | aagagctgcaagatgagctggaaatcgtgatgcgcgtctattttgaaaagccgcgtacta |
| | cggtgggctggaaagggctgattaacgatccgcatatggataacagcttccagatcaac |
| | gacggtctgcgtattgcccgcaaattgctgctcgatattaacgacagcggtctgccagcg |
| | gcgggtgaattcctggatatgatcaccctacaatatctcgctgacctgatgagctggggc |
| | gcaattggcgcacgtaccaccgaatcgcaggtgcaccgcgaactggcgtctggtctttc |
| | ttgtccggtaggtttcaaaaatggcactgatggtacgattaaagtggctatcgatgccatta |
| | atgccgccggtgcgccgcactgcttcctgtccgtaacgaaatgggggcattcggcgatt |
| | gtgaataccagcggtaacggcgattgccatatcattctgcgcggcggtaaagagcctaa |
| | ctacagcgcgaagcacgttgctgaagtgaaagaagggctgaacaaagcaggcctgcc |
| | agcgcaggtgatgatcgatttcagccatgctaactcgtcaaaacaattcaaaaagcagat |
| | ggatgtttgtactgacgtttgccagcagattgccggtggcgaaaaggccattattggcgt |
| | gatggtggaaagccatctggtggaaggcaatcagagcctcgagagcggggaaccgct |
| | ggcctacggtaagagcatcaccgatgcctgcattggctgggatgataccgatgctctgtt |
| | acgtcaactggcgagtgcagtaaaagcgcgtcgcgggtaa |
| fbrAroG | atgaattatcagaacgacgatttacgcatcaaagaaatcaaagagttacttcctcctgtcg |
| SEQ ID NO: 256 | cattgctggaaaaattccccgctactgaaaatgccgcgaatacggtcgcccatgcccga |
| | aaagcgatccataagatcctgaaaggtaatgatgatcgcctgttggtggtgattggccca |
| | tgctcaattcatgatcctgtcgcggctaaagagtatgccactcgcttgctgacgctgcgtg |
| | aagagctgcaagatgagctggaaatcgtgatgcgcgtctattttgaaaagccgcgtacta |
| | cggtgggctggaaagggctgattaacgatccgcatatggataacagatccagatcaac |
| | gacggtctgcgtattgcccgcaaattgctgctcgatattaacgacagcggtctgccagcg |
| | gcgggtgaattcctggatatgatcaccctacaatatctcgctgacctgatgagctggggc |
| | gcaattggcgcacgtaccaccgaatcgcaggtgcaccgcgaactggcgtctggtcttc |
| | ttgtccggtaggtttcaaaaatggcactgatggtacgattaaagtggctatcgatgccatta |
| | atgccgccggtgcgccgcactgcttcctgtccgtaacgaaatgggggcattcggcgatt |
| | gtgaataccagcggtaacggcgattgccatatcattctgcgcggcggtaaagagcctaa |
| | ctacagcgcgaagcacgttgctgaagtgaaagaagggctgaacaaagcaggcctgcc |
| | agcgcaggtgatgatcgatttcagccatgctaactcgtcaaaacaattcaaaaagcagat |
| | ggatgtttgtactgacgtttgccagcagattgccggtggcgaaaaggccattattggcgt |
| | gatggtggaaagccatctggtggaaggcaatcagagcctcgagagcggggaaccgct |
| | ggcctacggtaagagcatcaccgatgcctgcattggctgggatgataccgatgctctgtt |
| | acgtcaactggcgagtgcagtaaaagcgcgtcgcgggtaa |
| fbrAroG-serA | Ctctagaaataattttgtttaactttaagaaggagatatacatatgaattatcagaacgacg |
| (RBS and leader | atttacgcatcaaagaaatcaaagagttacttcctcctgtcgcattgctggaaaaattcccc |
| region underlined; | gctactgaaaatgccgcgaatacggtcgcccatgcccgaaaagcgatccataagatcct |
| SerA starts after | gaaaggtaatgatgatcgcctgttggtggtgattggcccatgctcaattcatgatcctgtc |
| second RBS) | gcggctaaagagtatgccactcgcttgctgacgctgcgtgaagagctgcaagatgagct |
| SEQ ID NO: 257 | ggaaatcgtgatgcgcgtctattttgaaaagccgcgtactacggtgggctggaaagggc |
| | tgattaacgatccgcatatggataacagcttccagatcaacgacggtctgcgtattgccc |
| | gcaaattgctgctcgatattaacgacagcggtctgccagcggcgggtgaattcctggata |
| | tgatcaccctacaatatctcgctgacctgatgagctggggcgcaattggcgcacgtacca |
| | ccgaatcgcaggtgcaccgcgaactggcgtctggtctttcttgtccggtaggtttcaaaa |
| | atggcactgatggtacgattaaagtggctatcgatgccattaatgccgccggtgcgccgc |
| | actgcttcctgtccgtaacgaaatgggggcattcggcgattgtgaataccagcggtaacg |
| | gcgattgccatatcattctgcgcggcggtaaagagcctaactacagcgcgaagcacgtt |
| | gctgaagtgaaagaagggctgaacaaagcaggcctgccagcgcaggtgatgatcgat |
| | ttcagccatgctaactcgtcaaaacaattcaaaaagcagatggatgtttgtactgacgtttg |
| | ccagcagattgccggtggcgaaaaggccattattggcgtgatggtggaaagccatctg |
| | gtggaaggcaatcagagcctcgagagcggggaaccgctggcctacggtaagagcatc |
| | accgatgcctgcattggctgggatgataccgatgctctgttacgtcaactggcgagtgca |
| | gtaaaagcgcgtcgcgggtaaTACT |
| | taagaaggagatatacatatggcaaaggtatcgctggagaaagacaagattaagtttctg |
| | ctggtagaaggcgtgcaccaaaaggcgctggaaagccttcgtgcagctggttacacca |
| | acatcgaatttcacaaaggcgcgctggatgatgaacaattaaaagaatccatccgcgat |
| | gcccacttcatcggcctgcgatcccgtacccatctgactgaagacgtgatcaacgccgc |
| | agaaaaactggtcgctattggctgtttctgtatcggaacaaatcaggttgatctggatgcg |
| | gcggcaaagcgcgggatcccggtatttaacgcaccgttctcaaatacgcgctctgttgc |
| | ggagctggtgattggcgaactgctgctgctattgcgcggcgtgccagaagccaatgcta |
| | aagcgcatcgtggcgtgtggaacaaactggcggcgggttcttttgaagcgcgcggcaa |
| | aaagctgggtatcatcggctacggtcatattggtacgcaattgggcattctggctgaatcg |
| | ctgggaatgtatgtttacttttatgatattgaaaacaaactgccgctgggcaacgccactca |
| | ggtacagcatctttctgacctgctgaatatgagcgatgtggtgagtctgcatgtaccagag |
| | aatccgtccaccaaaaatatgatgggcgcgaaagagatttcgctaatgaagcccggctc |
| | gctgctgattaatgcttcgcgcggtactgtggtggatattccagcgctgtgtgacgcgctg |
| | gcgagcaaacatctggcgggggcggcaatcgacgtattcccgacggaaccggcgac |
| | caatagcgatccatttacctctccgctgtgtgaattcgacaatgtccttctgacgccacaca |
| | ttggcggttcgactcaggaagcgcaggagaatatcggcttggaagttgcgggtaaattg |
| | atcaagtattctgacaatggctcaacgctctctgcggtgaacttcccggaagtctcgctgc |
| | cactgcacggtgggcgtcgtctgatgcacatccacgaaaaccgtccgggcgtgctaact |
| | gcgctcaacaaaatttttgccgagcagggcgtcaacatcgccgcgcaatatctacaaact |
| | tccgcccagatgggttatgtagttattgatattgaagccgacgaagacgttgccgaaaaa |
| | gcgctgcaggcaatgaaagctattccgggtaccattcgcgcccgtctgctgtactaa |
| SerA | atggcaaaggtatcgctggagaaagacaagattaagtttctgctggtagaaggcgtgca |
| SEQ ID NO: 258 | ccaaaaggcgctggaaagccttcgtgcagctggttacaccaacatcgaatttcacaaag |
| | gcgcgctggatgatgaacaattaaaagaatccatccgcgatgcccacttcatcggcctg |
| | cgatcccgtacccatctgactgaagacgtgatcaacgccgcagaaaaactggtcgctat |
| | tggctgtttctgtatcggaacaaatcaggttgatctggatgcggcggcaaagcgcgggat |
| | cccggtatttaacgcaccgttctcaaatacgcgctctgttgcggagctggtgattggcga |
| | actgctgctgctattgcgcggcgtgccagaagccaatgctaaagcgcatcgtggcgtgt |
| | ggaacaaactggcggcgggttcttttgaagcgcgcggcaaaaagctgggtatcatcgg |
| | ctacggtcatattggtacgcaattgggcattctggctgaatcgctgggaatgtatgtttactt |
| | ttatgatattgaaaacaaactgccgctgggcaacgccactcaggtacagcatctttctgac |
| | ctgctgaatatgagcgatgtggtgagtctgcatgtaccagagaatccgtccaccaaaaat |
| | atgatgggcgcgaaagagatttcgctaatgaagcccggctcgctgctgattaatgcttcg |
| | cgcggtactgtggtggatattccagcgctgtgtgacgcgctggcgagcaaacatctggc |
| | gggggcggcaatcgacgtattcccgacggaaccggcgaccaatagcgatccatttacc |
| | tctccgctgtgtgaattcgacaatgtccttctgacgccacacattggcggttcgactcagg |
| | aagcgcaggagaatatcggcttggaagttgcgggtaaattgatcaagtattctgacaatg |
| | gctcaacgctctctgcggtgaacttcccggaagtctcgctgccactgcacggtgggcgt |
| | cgtctgatgcacatccacgaaaaccgtccgggcgtgctaactgcgctcaacaaaattttt |
| | gccgagcagggcgtcaacatcgccgcgcaatatctacaaacttccgcccagatgggtt |
| | atgtagttattgatattgaagccgacgaagacgttgccgaaaaagcgctgcaggcaatg |
| | aaagctattccgggtaccattcgcgcccgtctgctgtactaa |
| fbrAroG-Tdc (tdc | ctctagaaataattttgtttaactttaagaaggagatatacatatgaattatcagaacgacga |
| from C. roseus); | tttacgcatcaaagaaatcaaagagttacttcctcctgtcgcattgctggaaaaattccccg |
| RBS and leader | ctactgaaaatgccgcgaatacggtcgcccatgcccgaaaagcgatccataagatcctg |
| region underlined | aaaggtaatgatgatcgcctgttggtggtgattggcccatgctcaattcatgatcctgtcgc |
| SEQ ID NO: 259 | ggctaaagagtatgccactcgcttgctgacgctgcgtgaagagctgcaagatgagctgg |
| | aaatcgtgatgcgcgtctattttgaaaagccgcgtactacggtgggctggaaagggctg |
| | attaacgatccgcatatggataacagcttccagatcaacgacggtctgcgtattgcccgc |
| | aaattgctgctcgatattaacgacagcggtctgccagcggcgggtgaattcctggatatg |
| | atcaccctacaatatctcgctgacctgatgagctggggcgcaattggcgcacgtaccac |
| | cgaatcgcaggtgcaccgcgaactggcgtctggtctttcttgtccggtaggtttcaaaaat |
| | ggcactgatggtacgattaaagtggctatcgatgccattaatgccgccggtgcgccgca |
| | ctgcttcctgtccgtaacgaaatgggggcattcggcgattgtgaataccagcggtaacg |
| | gcgattgccatatcattctgcgcggcggtaaagagcctaactacagcgcgaagcacgtt |
| | gctgaagtgaaagaagggctgaacaaagcaggcctgccagcgcaggtgatgatcgat |
| | ttcagccatgctaactcgtcaaaacaattcaaaaagcagatggatgtttgtactgacgtttg |
| | ccagcagattgccggtggcgaaaaggccattattggcgtgatggtggaaagccatctg |
| | gtggaaggcaatcagagcctcgagagcggggaaccgctggcctacggtaagagcatc |
| | accgatgcctgcattggctgggatgataccgatgctctgttacgtcaactggcgagtgca |
| | gtaaaagcgcgtcgcgggtaaTACTtaagaaggagatatacatATGGGTTC |
| | TATTGACTCGACGAATGTGGCCATGTCTAATTCTCCT |
| | GTTGGCGAGTTTAAGCCCCTTGAAGCAGAAGAGTTCC |
| | GTAAACAGGCACACCGCATGGTGGATTTTATTGCGGA |
| | TTATTACAAGAACGTAGAAACATACCCGGTCCTTTCC |
| | GAGGTTGAACCCGGCTATCTGCGCAAACGTATTCCCG |
| | AAACCGCACCATACCTGCCGGAGCCACTTGATGATAT |
| | TATGAAGGATATTCAAAAGGACATTATCCCCGGAAT |
| | GACGAACTGGATGTCCCCGAACTTTTACGCCTTCTTC |
| | CCGGCCACAGTTAGCTCAGCAGCTTTCTTGGGGGAAA |
| | TGCTTTCAACGGCCCTTAACAGCGTAGGATTTACCTG |
| | GGTCAGTTCCCCGGCAGCGACTGAATTAGAGATGATC |
| | GTTATGGATTGGCTTGCGCAAATTTTGAAACTTCCAA |
| | AAAGCTTTATGTTCTCCGGAACCGGGGGTGGTGTCAT |
| | CCAAAACACTACGTCAGAGTCGATCTTGTGCACTATT |
| | ATCGCGGCCCGTGAACGCGCCTTGGAAAAATTGGGC |
| | CCTGATTCAATTGGTAAGCTTGTCTGCTATGGGTCCG |
| | ATCAAACGCACACAATGTTTCCGAAAACCTGTAAGTT |
| | AGCAGGAATTTATCCGAATAATATCCGCCTTATCCCT |
| | ACCACGGTAGAAACCGACTTTGGCATCTCACCGCAG |
| | GTACTTCGCAAGATGGTCGAAGACGACGTCGCTGCG |
| | GGGTACGTTCCCTTATTTTTGTGTGCCACCTTGGGAA |
| | CGACATCAACTACGGCAACAGATCCTGTAGATTCGCT |
| | GTCCGAAATCGCAAACGAGTTTGGTATCTGGATTCAT |
| | GTCGACGCCGCATATGCTGGATCGGCTTGCATCTGCC |
| | CAGAATTTCGTCACTACCTTGATGGCATCGAACGTGT |
| | GGATTCCTTATCGCTGTCTCCCCACAAATGGCTTTTA |
| | GCATATCTGGATTGCACGTGCTTGTGGGTAAAACAAC |
| | CTCACCTGCTGCTTCGCGCTTTAACGACTAATCCCGA |
| | ATACTTGAAGAATAAACAGAGTGATTTAGATAAGGT |
| | CGTGGATTTTAAGAACTGGCAGATCGCAACAGGACG |
| | TAAGTTCCGCTCTTTAAAACTTTGGTTAATTCTGCGTT |
| | CCTACGGGGTAGTTAACCTGCAAAGTCATATCCGTAG |
| | TGATGTAGCGATGGGGAAGATGTTTGAGGAATGGGT |
| | CCGTTCCGATAGCCGCTTTGAAATCGTCGTGCCACGT |
| | AATTTTTCGCTTGTATGCTTTCGCTTGAAACCGGATGT |
| | ATCTAGTTTACATGTCGAGGAGGTCAACAAGAAGTTG |
| | TTGGATATGCTTAACTCCACCGGTCGCGTATATATGA |
| | CGCATACAATTGTTGGCGGAATCTATATGTTACGTTT |
| | GGCTGTAGGTAGCAGCTTGACAGAGGAACATCACGT |
| | GCGCCGCGTTTGGGACTTGATCCAGAAGCTTACGGAC |
| | GACCTGCTTAAAGAGGCGTGA |
| Tdc (tdc from C. | ATGGGTTCTATTGACTCGACGAATGTGGCCATGTCTA |
| roseus) | ATTCTCCTGTTGGCGAGTTTAAGCCCCTTGAAGCAGA |
| SEQ ID NO: 260 | AGAGTTCCGTAAACAGGCACACCGCATGGTGGATTTT |
| | ATTGCGGATTATTACAAGAACGTAGAAACATACCCG |
| | GTCCTTTCCGAGGTTGAACCCGGCTATCTGCGCAAAC |
| | GTATTCCCGAAACCGCACCATACCTGCCGGAGCCACT |
| | TGATGATATTATGAAGGATATTCAAAAGGACATTATC |
| | CCCGGAATGACGAACTGGATGTCCCCGAACTTTTACG |
| | CCTTCTTCCCGGCCACAGTTAGCTCAGCAGCTTTCTTG |
| | GGGGAAATGCTTTCAACGGCCCTTAACAGCGTAGGA |
| | TTTACCTGGGTCAGTTCCCCGGCAGCGACTGAATTAG |
| | AGATGATCGTTATGGATTGGCTTGCGCAAATTTTGAA |
| | ACTTCCAAAAAGCTTTATGTTCTCCGGAACCGGGGGT |
| | GGTGTCATCCAAAACACTACGTCAGAGTCGATCTTGT |
| | GCACTATTATCGCGGCCCGTGAACGCGCCTTGGAAAA |
| | ATTGGGCCCTGATTCAATTGGTAAGCTTGTCTGCTAT |
| | GGGTCCGATCAAACGCACACAATGTTTCCGAAAACCT |
| | GTAAGTTAGCAGGAATTTATCCGAATAATATCCGCCT |
| | TATCCCTACCACGGTAGAAACCGACTTTGGCATCTCA |
| | CCGCAGGTACTTCGCAAGATGGTCGAAGACGACGTC |
| | GCTGCGGGGTACGTTCCCTTATTTTTGTGTGCCACCTT |
| | GGGAACGACATCAACTACGGCAACAGATCCTGTAGA |
| | TTCGCTGTCCGAAATCGCAAACGAGTTTGGTATCTGG |
| | ATTCATGTCGACGCCGCATATGCTGGATCGGCTTGCA |
| | TCTGCCCAGAATTTCGTCACTACCTTGATGGCATCGA |
| | ACGTGTGGATTCCTTATCGCTGTCTCCCCACAAATGG |
| | CTTTTAGCATATCTGGATTGCACGTGCTTGTGGGTAA |
| | AACAACCTCACCTGCTGCTTCGCGCTTTAACGACTAA |
| | TCCCGAATACTTGAAGAATAAACAGAGTGATTTAGAT |
| | AAGGTCGTGGATTTTAAGAACTGGCAGATCGCAACA |
| | GGACGTAAGTTCCGCTCTTTAAAACTTTGGTTAATTC |
| | TGCGTTCCTACGGGGTAGTTAACCTGCAAAGTCATAT |
| | CCGTAGTGATGTAGCGATGGGGAAGATGTTTGAGGA |
| | ATGGGTCCGTTCCGATAGCCGCTTTGAAATCGTCGTG |
| | CCACGTAATTTTTCGCTTGTATGCTTTCGCTTGAAACC |
| | GGATGTATCTAGTTTACATGTCGAGGAGGTCAACAAG |
| | AAGTTGTTGGATATGCTTAACTCCACCGGTCGCGTAT |
| | ATATGACGCATACAATTGTTGGCGGAATCTATATGTT |
| | ACGTTTGGCTGTAGGTAGCAGCTTGACAGAGGAACA |
| | TCACGTGCGCCGCGTTTGGGACTTGATCCAGAAGCTT |
| | ACGGACGACCTGCTTAAAGAGGCGTGA |
| fbrAroG-Tdc (tdc | ctctagaaataattttgtttaactttaagaaggagatatacatatgaattatcagaacgacga |
| from Clostridium | tttacgcatcaaagaaatcaaagagttacttcctcctgtcgcattgctggaaaaattccccg |
| sporogenes); RBS | ctactgaaaatgccgcgaatacggtcgcccatgcccgaaaagcgatccataagatcctg |
| and leader region | aaaggtaatgatgatcgcctgttggtggtgattggcccatgctcaattcatgatcctgtcgc |
| underlined | ggctaaagagtatgccactcgcttgctgacgctgcgtgaagagctgcaagatgagctgg |
| SEQ ID NO: 261 | aaatcgtgatgcgcgtctattttgaaaagccgcgtactacggtgggctggaaagggctg |
| | attaacgatccgcatatggataacagatccagatcaacgacggtctgcgtattgcccgc |
| | aaattgctgctcgatattaacgacagcggtctgccagcggcgggtgaattcctggatatg |
| | atcaccctacaatatctcgctgacctgatgagctggggcgcaattggcgcacgtaccac |
| | cgaatcgcaggtgcaccgcgaactggcgtctggtctttcttgtccggtaggtttcaaaaat |
| | ggcactgatggtacgattaaagtggctatcgatgccattaatgccgccggtgcgccgca |
| | ctgcttcctgtccgtaacgaaatgggggcattcggcgattgtgaataccagcggtaacg |
| | gcgattgccatatcattctgcgcggcggtaaagagcctaactacagcgcgaagcacgtt |
| | gctgaagtgaaagaagggctgaacaaagcaggcctgccagcgcaggtgatgatcgat |
| | ttcagccatgctaactcgtcaaaacaattcaaaaagcagatggatgtttgtactgacgtttg |
| | ccagcagattgccggtggcgaaaaggccattattggcgtgatggtggaaagccatctg |
| | gtggaaggcaatcagagcctcgagagcggggaaccgctggcctacggtaagagcatc |
| | accgatgcctgcattggctgggatgataccgatgctctgttacgtcaactggcgagtgca |
| | gtaaaagcgcgtcgcgggtaaTACTtaagaaggagatatacatATGAAATT |
| | TTGGCGCAAGTATACGCAACAGGAGATGGATGAGAA |
| | AATCACAGAATCGCTTGAGAAGACATTAAATTACGA |
| | TAACACGAAAACCATCGGCATCCCAGGTACTAAGCT |
| | GGATGATACTGTATTTTATGACGATCACTCCTTCGTT |
| | AAGCACTCTCCCTATTTACGTACGTTCATCCAAAACC |
| | CTAATCACATTGGTTGTCACACGTACGATAAAGCAGA |
| | CATCTTGTTTGGCGGCACGTTTGACATCGAACGCGAA |
| | CTGATTCAGCTTTTGGCCATCGATGTCTTAAACGGAA |
| | ATGATGAGGAATTCGATGGATATGTGACACAGGGGG |
| | GAACCGAGGCGAATATTCAGGCAATGTGGGTTTATC |
| | GTAACTATTTCAAAAAAGAACGTAAAGCAAAACATG |
| | AGGAAATCGCAATCATCACGAGCGCGGATACCCATT |
| | ACAGTGCATATAAGGGGAGCGACTTGCTGAACATTG |
| | ATATTATCAAGGTCCCAGTAGACTTCTATTCGCGTAA |
| | GATCCAGGAGAACACGTTAGACTCGATTGTCAAGGA |
| | GGCGAAGGAAATTGGAAAGAAGTACTTCATTGTCAT |
| | CTCAAACATGGGTACGACTATGTTTGGCAGTGTAGAC |
| | GACCCTGATCTTTATGCTAACATTTTTGATAAGTATA |
| | ACTTAGAATACAAAATCCACGTCGATGGAGCTTTTGG |
| | GGGTTTCATTTATCCTATCGATAATAAGGAGTGCAAA |
| | ACAGATTTCTCGAACAAGAACGTCTCATCCATCACGC |
| | TTGACGGTCACAAAATGCTTCAAGCCCCCTATGGGAC |
| | TGGTATCTTCGTGTCACGTAAGAACTTGATCCATAAC |
| | ACCCTGACAAAGGAAGCAACGTATATTGAAAACCTG |
| | GACGTTACCCTGAGTGGGTCCCGCTCCGGATCCAACG |
| | CCGTTGCGATCTGGATGGTTTTAGCCTCTTATGGCCC |
| | CTACGGGTGGATGGAGAAGATTAACAAGTTGCGCAA |
| | TCGCACTAAGTGGCTTTGCAAGCAGCTTAACGACATG |
| | CGCATCAAATACTATAAGGAGGATAGCATGAATATC |
| | GTCACGATTGAAGAGCAATACGTAAATAAAGAGATT |
| | GCAGAGAAATACTTCCTTGTGCCTGAAGTACACAATC |
| | CTACCAACAATTGGTACAAGATTGTAGTCATGGAACA |
| | TGTTGAACTTGACATCTTGAACTCCCTTGTTTATGATT |
| | TACGTAAATTCAACAAGGAGCACCTGAAGGCAATGT |
| | GA |
| Tdc (tdc from | ATGAAATTTTGGCGCAAGTATACGCAACAGGAGATG |
| Clostridium | GATGAGAAAATCACAGAATCGCTTGAGAAGACATTA |
| sporogenes) | AATTACGATAACACGAAAACCATCGGCATCCCAGGT |
| SEQ ID NO: 262 | ACTAAGCTGGATGATACTGTATTTTATGACGATCACT |
| | CCTTCGTTAAGCACTCTCCCTATTTACGTACGTTCATC |
| | CAAAACCCTAATCACATTGGTTGTCACACGTACGATA |
| | AAGCAGACATCTTGTTTGGCGGCACGTTTGACATCGA |
| | ACGCGAACTGATTCAGCTTTTGGCCATCGATGTCTTA |
| | AACGGAAATGATGAGGAATTCGATGGATATGTGACA |
| | CAGGGGGGAACCGAGGCGAATATTCAGGCAATGTGG |
| | GTTTATCGTAACTATTTCAAAAAAGAACGTAAAGCAA |
| | AACATGAGGAAATCGCAATCATCACGAGCGCGGATA |
| | CCCATTACAGTGCATATAAGGGGAGCGACTTGCTGA |
| | ACATTGATATTATCAAGGTCCCAGTAGACTTCTATTC |
| | GCGTAAGATCCAGGAGAACACGTTAGACTCGATTGT |
| | CAAGGAGGCGAAGGAAATTGGAAAGAAGTACTTCAT |
| | TGTCATCTCAAACATGGGTACGACTATGTTTGGCAGT |
| | GTAGACGACCCTGATCTTTATGCTAACATTTTTGATA |
| | AGTATAACTTAGAATACAAAATCCACGTCGATGGAG |
| | CTTTTGGGGGTTTCATTTATCCTATCGATAATAAGGA |
| | GTGCAAAACAGATTTCTCGAACAAGAACGTCTCATCC |
| | ATCACGCTTGACGGTCACAAAATGCTTCAAGCCCCCT |
| | ATGGGACTGGTATCTTCGTGTCACGTAAGAACTTGAT |
| | CCATAACACCCTGACAAAGGAAGCAACGTATATTGA |
| | AAACCTGGACGTTACCCTGAGTGGGTCCCGCTCCGGA |
| | TCCAACGCCGTTGCGATCTGGATGGTTTTAGCCTCTT |
| | ATGGCCCCTACGGGTGGATGGAGAAGATTAACAAGT |
| | TGCGCAATCGCACTAAGTGGCTTTGCAAGCAGCTTAA |
| | CGACATGCGCATCAAATACTATAAGGAGGATAGCAT |
| | GAATATCGTCACGATTGAAGAGCAATACGTAAATAA |
| | AGAGATTGCAGAGAAATACTTCCTTGTGCCTGAAGTA |
| | CACAATCCTACCAACAATTGGTACAAGATTGTAGTCA |
| | TGGAACATGTTGAACTTGACATCTTGAACTCCCTTGT |
| | TTATGATTTACGTAAATTCAACAAGGAGCACCTGAAG |
| | GCAATGTGA |
| fbrArG-trpDH- | Ctctagaaataattttgtttaactttaagaaggagatatacat |
| ipdC-iadl (RBS | atgaattatcagaacgacgatttacgcatcaaagaaatcaaagagttacttcctcctgtcg |
| and leader region | cattgctggaaaaattccccgctactgaaaatgccgcgaatacggtcgcccatgcccga |
| underlined) | aaagcgatccataagatcctgaaaggtaatgatgatcgcctgttggtggtgattggccca |
| SEQ ID NO: 263 | tgctcaattcatgatcctgtcgcggctaaagagtatgccactcgcttgctgacgctgcgtg |
| | aagagctgcaagatgagctggaaatcgtgatgcgcgtctattttgaaaagccgcgtacta |
| | cggtgggctggaaagggctgattaacgatccgcatatggataacagatccagatcaac |
| | gacggtctgcgtattgcccgcaaattgctgctcgatattaacgacagcggtctgccagcg |
| | gcgggtgaattcctggatatgatcaccctacaatatctcgctgacctgatgagctggggc |
| | gcaattggcgcacgtaccaccgaatcgcaggtgcaccgcgaactggcgtctggtctttc |
| | ttgtccggtaggtttcaaaaatggcactgatggtacgattaaagtggctatcgatgccatta |
| | atgccgccggtgcgccgcactgcttcctgtccgtaacgaaatgggggcattcggcgatt |
| | gtgaataccagcggtaacggcgattgccatatcattctgcgcggcggtaaagagcctaa |
| | ctacagcgcgaagcacgttgctgaagtgaaagaagggctgaacaaagcaggcctgcc |
| | agcgcaggtgatgatcgatttcagccatgctaactcgtcaaaacaattcaaaaagcagat |
| | ggatgtttgtactgacgtttgccagcagattgccggtggcgaaaaggccattattggcgt |
| | gatggtggaaagccatctggtggaaggcaatcagagcctcgagagcggggaaccgct |
| | ggcctacggtaagagcatcaccgatgcctgcattggctgggatgataccgatgctctgtt |
| | acgtcaactggcgagtgcagtaaaagcgcgtcgcgggtaaTACTtaagaaggaga |
| | tatacatATGCTGTTATTCGAGACTGTGCGTGAAATGGGT |
| | CATGAGCAAGTCCTTTTCTGTCATAGCAAGAATCCCG |
| | AGATCAAGGCAATTATCGCAATCCACGATACCACCTT |
| | AGGACCGGCTATGGGCGCAACTCGTATCTTACCTTAT |
| | ATTAATGAGGAGGCTGCCCTGAAAGATGCATTACGTC |
| | TGTCCCGCGGAATGACTTACAAAGCAGCCTGCGCCA |
| | ATATTCCCGCCGGGGGCGGCAAAGCCGTCATCATCGC |
| | TAACCCCGAAAACAAGACCGATGACCTGTTACGCGC |
| | ATACGGCCGTTTCGTGGACAGCTTGAACGGCCGTTTC |
| | ATCACCGGGCAGGACGTTAACATTACGCCCGACGAC |
| | GTTCGCACTATTTCGCAGGAGACTAAGTACGTGGTAG |
| | GCGTCTCAGAAAAGTCGGGAGGGCCGGCACCTATCA |
| | CCTCTCTGGGAGTATTTTTAGGCATCAAAGCCGCTGT |
| | AGAGTCGCGTTGGCAGTCTAAACGCCTGGATGGCAT |
| | GAAAGTGGCGGTGCAAGGACTTGGGAACGTAGGAAA |
| | AAATCTTTGTCGCCATCTGCATGAACACGATGTACAA |
| | CTTTTTGTGTCTGATGTCGATCCAATCAAGGCCGAGG |
| | AAGTAAAACGCTTATTCGGGGCGACTGTTGTCGAACC |
| | GACTGAAATCTATTCTTTAGATGTTGATATTTTTGCAC |
| | CGTGTGCACTTGGGGGTATTTTGAATAGCCATACCAT |
| | CCCGTTCTTACAAGCCTCAATCATCGCAGGAGCAGCG |
| | AATAACCAGCTGGAGAACGAGCAACTTCATTCGCAG |
| | ATGCTTGCGAAAAAGGGTATTCTTTACTCACCAGACT |
| | ACGTTATCAATGCAGGAGGACTTATCAATGTTTATAA |
| | CGAAATGATCGGATATGACGAGGAAAAAGCATTCAA |
| | ACAAGTTCATAACATCTACGATACGTTATTAGCGATT |
| | TTCGAAATTGCAAAAGAACAAGGTGTAACCACCAAC |
| | GACGCGGCCCGTCGTTTAGCAGAGGATCGTATCAAC |
| | AACTCCAAACGCTCAAAGAGTAAAGCGATTGCGGCG |
| | TGAAATGtaagaaggagatatacatATGCGTACACCCTACTGTG |
| | TCGCCGATTATCTTTTAGATCGTCTGACGGACTGCGG |
| | GGCCGATCACCTGTTTGGCGTACCGGGCGATTACAAC |
| | TTGCAGTTTCTGGACCACGTCATTGACTCACCAGATA |
| | TCTGCTGGGTAGGGTGTGCGAACGAGCTTAACGCGA |
| | GCTACGCTGCTGACGGATATGCGCGTTGTAAAGGCTT |
| | TGCTGCACTTCTTACTACCTTCGGGGTCGGTGAGTTA |
| | TCGGCGATGAACGGTATCGCAGGCTCGTACGCTGAG |
| | CACGTCCCGGTATTACACATTGTGGGAGCTCCGGGTA |
| | CCGCAGCTCAACAGCGCGGAGAACTGTTACACCACA |
| | CGCTGGGCGACGGAGAATTCCGCCACTTTTACCATAT |
| | GTCCGAGCCAATTACTGTAGCCCAGGCTGTACTTACA |
| | GAGCAAAATGCCTGTTACGAGATCGACCGTGTTTTGA |
| | CCACGATGCTTCGCGAGCGCCGTCCCGGGTATTTGAT |
| | GCTGCCAGCCGATGTTGCCAAAAAAGCTGCGACGCC |
| | CCCAGTGAATGCCCTGACGCATAAACAAGCTCATGCC |
| | GATTCCGCCTGTTTAAAGGCTTTTCGCGATGCAGCTG |
| | AAAATAAATTAGCCATGTCGAAACGCACCGCCTTGTT |
| | GGCGGACTTTCTGGTCCTGCGCCATGGCCTTAAACAC |
| | GCCCTTCAGAAATGGGTCAAAGAAGTCCCGATGGCC |
| | CACGCTACGATGCTTATGGGTAAGGGGATTTTTGATG |
| | AACGTCAAGCGGGATTTTATGGAACTTATTCCGGTTC |
| | GGCGAGTACGGGGGCGGTAAAGGAAGCGATTGAGGG |
| | AGCCGACACAGTTCTTTGCGTGGGGACACGTTTCACC |
| | GATACACTGACCGCTGGATTCACACACCAACTTACTC |
| | CGGCACAAACGATTGAGGTGCAACCCCATGCGGCTC |
| | GCGTGGGGGATGTATGGTTTACGGGCATTCCAATGAA |
| | TCAAGCCATTGAGACTCTTGTCGAGCTGTGCAAACAG |
| | CACGTCCACGCAGGACTGATGAGTTCGAGCTCTGGG |
| | GCGATTCCTTTTCCACAACCAGATGGTAGTTTAACTC |
| | AAGAAAACTTCTGGCGCACATTGCAAACCTTTATCCG |
| | CCCAGGTGATATCATCTTAGCAGACCAGGGTACTTCA |
| | GCCTTTGGAGCAATTGACCTGCGCTTACCAGCAGACG |
| | TGAACTTTATTGTGCAGCCGCTGTGGGGGTCTATTGG |
| | TTATACTTTAGCTGCGGCCTTCGGAGCGCAGACAGCG |
| | TGTCCAAACCGTCGTGTGATCGTATTGACAGGAGATG |
| | GAGCAGCGCAGTTGACCATTCAGGAGTTAGGCTCGA |
| | TGTTACGCGATAAGCAGCACCCCATTATCCTGGTCCT |
| | GAACAATGAGGGGTATACAGTTGAACGCGCCATTCA |
| | TGGTGCGGAACAACGCTACAATGACATCGCTTTATGG |
| | AATTGGACGCACATCCCCCAAGCCTTATCGTTAGATC |
| | CCCAATCGGAATGTTGGCGTGTGTCTGAAGCAGAGC |
| | AACTGGCTGATGTTCTGGAAAAAGTTGCTCATCATGA |
| | ACGCCTGTCGTTGATCGAGGTAATGTTGCCCAAGGCC |
| | GATATCCCTCCGTTACTGGGAGCCTTGACCAAGGCTT |
| | TAGAAGCCTGCAACAACGCTTAAAGGTtaagaaggagatata |
| | catATGCCCACCTTGAACTTGGACTTACCCAACGGTAT |
| | TAAGAGCACGATTCAGGCAGACCTTTTCATCAATAAT |
| | AAGTTTGTGCCGGCGCTTGATGGGAAAACGTTCGCAA |
| | CTATTAATCCGTCTACGGGGAAAGAGATCGGACAGG |
| | TGGCAGAGGCTTCGGCGAAGGATGTGGATCTTGCAG |
| | TTAAGGCCGCGCGTGAGGCGTTTGAAACTACTTGGGG |
| | GGAAAACACGCCAGGTGATGCTCGTGGCCGTTTACTG |
| | ATTAAGCTTGCTGAGTTGGTGGAAGCGAATATTGATG |
| | AGTTAGCGGCAATTGAATCACTGGACAATGGGAAAG |
| | CGTTCTCTATTGCTAAGTCATTCGACGTAGCTGCTGT |
| | GGCCGCAAACTTACGTTACTACGGCGGTTGGGCTGAT |
| | AAAAACCACGGTAAAGTCATGGAGGTAGACACAAAG |
| | CGCCTGAACTATACCCGCCACGAGCCGATCGGGGTTT |
| | GCGGACAAATCATTCCGTGGAATTTCCCGCTTTTGAT |
| | GTTTGCATGGAAGCTGGGTCCCGCTTTAGCCACAGGG |
| | AACACAATTGTGTTAAAGACTGCCGAGCAGACTCCCT |
| | TAAGTGCTATCAAGATGTGTGAATTAATCGTAGAAGC |
| | CGGCTTTCCGCCCGGAGTAGTTAATGTGATCTCGGGA |
| | TTCGGACCGGTGGCGGGGGCCGCGATCTCGCAACAC |
| | ATGGACATCGATAAGATTGCCTTTACAGGATCGACAT |
| | TGGTTGGCCGCAACATTATGAAGGCAGCTGCGTCGAC |
| | TAACTTAAAAAAGGTTACACTTGAGTTAGGAGGAAA |
| | ATCCCCGAATATCATTTTCAAAGATGCCGACCTTGAC |
| | CAAGCTGTTCGCTGGAGCGCCTTCGGTATCATGTTTA |
| | ACCACGGACAATGCTGCTGCGCTGGATCGCGCGTATA |
| | TGTGGAAGAATCCATCTATGACGCCTTCATGGAAAAA |
| | ATGACTGCGCATTGTAAGGCGCTTCAAGTTGGAGATC |
| | CTTTCAGCGCGAACACCTTCCAAGGACCACAAGTCTC |
| | GCAGTTACAATACGACCGTATCATGGAATACATCGA |
| | ATCAGGGAAAAAAGATGCAAATCTTGCTTTAGGCGG |
| | CGTTCGCAAAGGGAATGAGGGGTATTTCATTGAGCC |
| | AACTATTTTTACAGACGTGCCGCACGACGCGAAGATT |
| | GCCAAAGAGGAGATCTTCGGTCCAGTGGTTGTTGTGT |
| | CGAAATTTAAGGACGAAAAAGATCTGATCCGTATCG |
| | CAAATGATTCTATTTATGGTTTAGCTGCGGCAGTCTTT |
| | TCCCGCGACATCAGCCGCGCGATCGAGACAGCACAC |
| | AAACTGAAAGCAGGCACGGTCTGGGTCAACTGCTAT |
| | AATCAGCTTATTCCGCAGGTGCCATTCGGAGGGTATA |
| | AGGCTTCCGGTATCGGCCGTGAGTTGGGGGAATATGC |
| | CTTGTCTAATTACACAAATATCAAGGCCGTCCACGTT |
| | AACCTTTCTCAACCGGCGCCCATTTGA |
| trpDH | ATGCTGTTATTCGAGACTGTGCGTGAAATGGGTCATG |
| SEQ ID NO: 264 | AGCAAGTCCTTTTCTGTCATAGCAAGAATCCCGAGAT |
| | CAAGGCAATTATCGCAATCCACGATACCACCTTAGGA |
| | CCGGCTATGGGCGCAACTCGTATCTTACCTTATATTA |
| | ATGAGGAGGCTGCCCTGAAAGATGCATTACGTCTGTC |
| | CCGCGGAATGACTTACAAAGCAGCCTGCGCCAATATT |
| | CCCGCCGGGGGCGGCAAAGCCGTCATCATCGCTAAC |
| | CCCGAAAACAAGACCGATGACCTGTTACGCGCATAC |
| | GGCCGTTTCGTGGACAGCTTGAACGGCCGTTTCATCA |
| | CCGGGCAGGACGTTAACATTACGCCCGACGACGTTC |
| | GCACTATTTCGCAGGAGACTAAGTACGTGGTAGGCGT |
| | CTCAGAAAAGTCGGGAGGGCCGGCACCTATCACCTC |
| | TCTGGGAGTATTTTTAGGCATCAAAGCCGCTGTAGAG |
| | TCGCGTTGGCAGTCTAAACGCCTGGATGGCATGAAA |
| | GTGGCGGTGCAAGGACTTGGGAACGTAGGAAAAAAT |
| | CTTTGTCGCCATCTGCATGAACACGATGTACAACTTT |
| | TTGTGTCTGATGTCGATCCAATCAAGGCCGAGGAAGT |
| | AAAACGCTTATTCGGGGCGACTGTTGTCGAACCGACT |
| | GAAATCTATTCTTTAGATGTTGATATTTTTGCACCGTG |
| | TGCACTTGGGGGTATTTTGAATAGCCATACCATCCCG |
| | TTCTTACAAGCCTCAATCATCGCAGGAGCAGCGAATA |
| | ACCAGCTGGAGAACGAGCAACTTCATTCGCAGATGC |
| | TTGCGAAAAAGGGTATTCTTTACTCACCAGACTACGT |
| | TATCAATGCAGGAGGACTTATCAATGTTTATAACGAA |
| | ATGATCGGATATGACGAGGAAAAAGCATTCAAACAA |
| | GTTCATAACATCTACGATACGTTATTAGCGATTTTCG |
| | AAATTGCAAAAGAACAAGGTGTAACCACCAACGACG |
| | CGGCCCGTCGTTTAGCAGAGGATCGTATCAACAACTC |
| | CAAACGCTCAAAGAGTAAAGCGATTGCGGCGTGA |
| ipdC | ATGCGTACACCCTACTGTGTCGCCGATTATCTTTTAG |
| SEQ ID NO: 265 | ATCGTCTGACGGACTGCGGGGCCGATCACCTGTTTGG |
| | CGTACCGGGCGATTACAACTTGCAGTTTCTGGACCAC |
| | GTCATTGACTCACCAGATATCTGCTGGGTAGGGTGTG |
| | CGAACGAGCTTAACGCGAGCTACGCTGCTGACGGAT |
| | ATGCGCGTTGTAAAGGCTTTGCTGCACTTCTTACTAC |
| | CTTCGGGGTCGGTGAGTTATCGGCGATGAACGGTATC |
| | GCAGGCTCGTACGCTGAGCACGTCCCGGTATTACACA |
| | TTGTGGGAGCTCCGGGTACCGCAGCTCAACAGCGCG |
| | GAGAACTGTTACACCACACGCTGGGCGACGGAGAAT |
| | TCCGCCACTTTTACCATATGTCCGAGCCAATTACTGT |
| | AGCCCAGGCTGTACTTACAGAGCAAAATGCCTGTTAC |
| | GAGATCGACCGTGTTTTGACCACGATGCTTCGCGAGC |
| | GCCGTCCCGGGTATTTGATGCTGCCAGCCGATGTTGC |
| | CAAAAAAGCTGCGACGCCCCCAGTGAATGCCCTGAC |
| | GCATAAACAAGCTCATGCCGATTCCGCCTGTTTAAAG |
| | GCTTTTCGCGATGCAGCTGAAAATAAATTAGCCATGT |
| | CGAAACGCACCGCCTTGTTGGCGGACTTTCTGGTCCT |
| | GCGCCATGGCCTTAAACACGCCCTTCAGAAATGGGTC |
| | AAAGAAGTCCCGATGGCCCACGCTACGATGCTTATG |
| | GGTAAGGGGATTTTTGATGAACGTCAAGCGGGATTTT |
| | ATGGAACTTATTCCGGTTCGGCGAGTACGGGGGCGGT |
| | AAAGGAAGCGATTGAGGGAGCCGACACAGTTCTTTG |
| | CGTGGGGACACGTTTCACCGATACACTGACCGCTGGA |
| | TTCACACACCAACTTACTCCGGCACAAACGATTGAGG |
| | TGCAACCCCATGCGGCTCGCGTGGGGGATGTATGGTT |
| | TACGGGCATTCCAATGAATCAAGCCATTGAGACTCTT |
| | GTCGAGCTGTGCAAACAGCACGTCCACGCAGGACTG |
| | ATGAGTTCGAGCTCTGGGGCGATTCCTTTTCCACAAC |
| | CAGATGGTAGTTTAACTCAAGAAAACTTCTGGCGCAC |
| | ATTGCAAACCTTTATCCGCCCAGGTGATATCATCTTA |
| | GCAGACCAGGGTACTTCAGCCTTTGGAGCAATTGACC |
| | TGCGCTTACCAGCAGACGTGAACTTTATTGTGCAGCC |
| | GCTGTGGGGGTCTATTGGTTATACTTTAGCTGCGGCC |
| | TTCGGAGCGCAGACAGCGTGTCCAAACCGTCGTGTG |
| | ATCGTATTGACAGGAGATGGAGCAGCGCAGTTGACC |
| | ATTCAGGAGTTAGGCTCGATGTTACGCGATAAGCAGC |
| | ACCCCATTATCCTGGTCCTGAACAATGAGGGGTATAC |
| | AGTTGAACGCGCCATTCATGGTGCGGAACAACGCTA |
| | CAATGACATCGCTTTATGGAATTGGACGCACATCCCC |
| | CAAGCCTTATCGTTAGATCCCCAATCGGAATGTTGGC |
| | GTGTGTCTGAAGCAGAGCAACTGGCTGATGTTCTGGA |
| | AAAAGTTGCTCATCATGAACGCCTGTCGTTGATCGAG |
| | GTAATGTTGCCCAAGGCCGATATCCCTCCGTTACTGG |
| | GAGCCTTGACCAAGGCTTTAGAAGCCTGCAACAACG |
| | CTTAA |
| Iad1 | ATGCCCACCTTGAACTTGGACTTACCCAACGGTATTA |
| SEQ ID NO: 266 | AGAGCACGATTCAGGCAGACCTTTTCATCAATAATAA |
| | GTTTGTGCCGGCGCTTGATGGGAAAACGTTCGCAACT |
| | ATTAATCCGTCTACGGGGAAAGAGATCGGACAGGTG |
| | GCAGAGGCTTCGGCGAAGGATGTGGATCTTGCAGTT |
| | AAGGCCGCGCGTGAGGCGTTTGAAACTACTTGGGGG |
| | GAAAACACGCCAGGTGATGCTCGTGGCCGTTTACTGA |
| | TTAAGCTTGCTGAGTTGGTGGAAGCGAATATTGATGA |
| | GTTAGCGGCAATTGAATCACTGGACAATGGGAAAGC |
| | GTTCTCTATTGCTAAGTCATTCGACGTAGCTGCTGTG |
| | GCCGCAAACTTACGTTACTACGGCGGTTGGGCTGATA |
| | AAAACCACGGTAAAGTCATGGAGGTAGACACAAAGC |
| | GCCTGAACTATACCCGCCACGAGCCGATCGGGGTTTG |
| | CGGACAAATCATTCCGTGGAATTTCCCGCTTTTGATG |
| | TTTGCATGGAAGCTGGGTCCCGCTTTAGCCACAGGGA |
| | ACACAATTGTGTTAAAGACTGCCGAGCAGACTCCCTT |
| | AAGTGCTATCAAGATGTGTGAATTAATCGTAGAAGCC |
| | GGCTTTCCGCCCGGAGTAGTTAATGTGATCTCGGGAT |
| | TCGGACCGGTGGCGGGGGCCGCGATCTCGCAACACA |
| | TGGACATCGATAAGATTGCCTTTACAGGATCGACATT |
| | GGTTGGCCGCAACATTATGAAGGCAGCTGCGTCGACT |
| | AACTTAAAAAAGGTTACACTTGAGTTAGGAGGAAAA |
| | TCCCCGAATATCATTTTCAAAGATGCCGACCTTGACC |
| | AAGCTGTTCGCTGGAGCGCCTTCGGTATCATGTTTAA |
| | CCACGGACAATGCTGCTGCGCTGGATCGCGCGTATAT |
| | GTGGAAGAATCCATCTATGACGCCTTCATGGAAAAA |
| | ATGACTGCGCATTGTAAGGCGCTTCAAGTTGGAGATC |
| | CTTTCAGCGCGAACACCTTCCAAGGACCACAAGTCTC |
| | GCAGTTACAATACGACCGTATCATGGAATACATCGA |
| | ATCAGGGAAAAAAGATGCAAATCTTGCTTTAGGCGG |
| | CGTTCGCAAAGGGAATGAGGGGTATTTCATTGAGCC |
| | AACTATTTTTACAGACGTGCCGCACGACGCGAAGATT |
| | GCCAAAGAGGAGATCTTCGGTCCAGTGGTTGTTGTGT |
| | CGAAATTTAAGGACGAAAAAGATCTGATCCGTATCG |
| | CAAATGATTCTATTTATGGTTTAGCTGCGGCAGTCTTT |
| | TCCCGCGACATCAGCCGCGCGATCGAGACAGCACAC |
| | AAACTGAAAGCAGGCACGGTCTGGGTCAACTGCTAT |
| | AATCAGCTTATTCCGCAGGTGCCATTCGGAGGGTATA |
| | AGGCTTCCGGTATCGGCCGTGAGTTGGGGGAATATGC |
| | CTTGTCTAATTACACAAATATCAAGGCCGTCCACGTT |
| | AACCTTTCTCAACCGGCGCCCATTTGA |
| TrpEDCBA (RBS | Ctctagaaataattttgtttaactttaagaaggagatatacat |
| and leader region | atgcaaacacaaaaaccgactctcgaactgctaacctgcgaaggcgcttatcgcgacaa |
| underlined) | cccgactgcgctttttcaccagttgtgtggggatcgtccggcaacgctgctgctggaatc |
| SEQ ID NO: 267 | cgcagatatcgacagcaaagatgatttaaaaagcctgctgctggtagacagtgcgctgc |
| | gcattacagcattaagtgacactgtcacaatccaggcgctttccggcaatggagaagcc |
| | ctgttgacactactggataacgccttgcctgcgggtgtggaaaatgaacaatcaccaaac |
| | tgccgcgtactgcgcttcccgcctgtcagtccactgctggatgaagacgcccgcttatgc |
| | tccctttcggtttttgacgctttccgcttattacagaatctgttgaatgtaccgaaggaagaa |
| | cgagaagcaatgttcttcggcggcctgttctcttatgaccttgtggcgggatttgaaaattt |
| | accgcaactgtcagcggaaaatagctgccctgatttctgtttttatctcgctgaaacgctga |
| | tggtgattgaccatcagaaaaaaagcactcgtattcaggccagcctgtttgctccgaatg |
| | aagaagaaaaacaacgtctcactgctcgcctgaacgaactacgtcagcaactgaccga |
| | agccgcgccgccgctgccggtggtttccgtgccgcatatgcgttgtgaatgtaaccaga |
| | gcgatgaagagttcggtggtgtagtgcgtttgttgcaaaaagcgattcgcgccggagaa |
| | attttccaggtggtgccatctcgccgtttctctctgccctgcccgtcaccgctggcagccta |
| | ttacgtgctgaaaaagagtaatcccagcccgtacatgttttttatgcaggataatgatttcac |
| | cctgtttggcgcgtcgccggaaagttcgctcaagtatgacgccaccagccgccagattg |
| | agatttacccgattgccggaacacgtccacgcggtcgtcgtgccgatggttcgctggac |
| | agagacctcgacagccgcatcgaactggagatgcgtaccgatcataaagagctttctga |
| | acatctgatgctggtggatctcgcccgtaatgacctggcacgcatttgcacacccggca |
| | gccgctacgtcgccgatctcaccaaagttgaccgttactcttacgtgatgcacctagtctc |
| | ccgcgttgttggtgagctgcgccacgatctcgacgccctgcacgcttaccgcgcctgtat |
| | gaatatggggacgttaagcggtgcaccgaaagtacgcgctatgcagttaattgccgaag |
| | cagaaggtcgtcgacgcggcagctacggcggcgcggtaggttattttaccgcgcatgg |
| | cgatctcgacacctgcattgtgatccgctcggcgctggtggaaaacggtatcgccaccg |
| | tgcaagccggtgctggcgtagtccttgattctgttccgcagtcggaagccgacgaaactc |
| | gtaataaagcccgcgctgtactgcgcgctattgccaccgcgcatcatgcacaggagac |
| | gttctaatggctgacattctgctgctcgataatatcgactcttttacgtacaacctggcagat |
| | cagttgcgcagcaatggtcataacgtggtgatttaccgcaaccatattccggcgcagacc |
| | ttaattgaacgcctggcgacgatgagcaatccggtgctgatgctttctcctggccccggt |
| | gtgccgagcgaagccggttgtatgccggaactcctcacccgcttgcgtggcaagctgc |
| | caattattggcatttgcctcggacatcaggcgattgtcgaagcttacgggggctatgtcgg |
| | tcaggcgggcgaaattcttcacggtaaagcgtcgagcattgaacatgacggtcaggcg |
| | atgtttgccggattaacaaacccgctgccagtggcgcgttatcactcgctggttggcagt |
| | aacattccggccggtttaaccatcaacgcccattttaatggcatggtgatggcggtgcgtc |
| | acgatgcagatcgcgtttgtggattccagttccatccggaatccattcttactacccaggg |
| | cgctcgcctgctggaacaaacgctggcctgggcgcagcagaaactagagccaaccaa |
| | cacgctgcaaccgattctggaaaaactgtatcaggcacagacgcttagccaacaagaa |
| | agccaccagctgttttcagcggtggtacgtggcgagctgaagccggaacaactggcgg |
| | cggcgctggtgagcatgaaaattcgcggtgaacacccgaacgagatcgccggggcag |
| | caaccgcgctactggaaaacgccgcgccattcccgcgcccggattatctgtttgccgat |
| | atcgtcggtactggcggtgacggcagcaacagcatcaatatttctaccgccagtgcgttt |
| | gtcgccgcggcctgcgggctgaaagtggcgaaacacggcaaccgtagcgtctccagt |
| | aaatccggctcgtcggatctgctggcggcgttcggtattaatcttgatatgaacgccgata |
| | aatcgcgccaggcgctggatgagttaggcgtctgtttcctctttgcgccgaagtatcaca |
| | ccggattccgccatgcgatgccggttcgccagcaactgaaaacccgcactctgttcaac |
| | gtgctgggaccattgattaacccggcgcatccgccgctggcgctaattggtgtttatagtc |
| | cggaactggtgctgccgattgccgaaaccttgcgcgtgctggggtatcaacgcgcggc |
| | agtggtgcacagcggcgggatggatgaagtttcattacacgcgccgacaatcgttgccg |
| | aactacatgacggcgaaattaagagctatcaattgaccgctgaagattttggcctgacac |
| | cctaccaccaggagcaattggcaggcggaacaccggaagaaaaccgtgacattttaac |
| | acgcttgttacaaggtaaaggcgacgccgcccatgaagcagccgtcgcggcgaatgtc |
| | gccatgttaatgcgcctgcatggccatgaagatctgcaagccaatgcgcaaaccgttctt |
| | gaggtactgcgcagtggttccgcttacgacagagtcaccgcactggcggcacgagggt |
| | aaatgatgcaaaccgttttagcgaaaatcgtcgcagacaaggcgatttgggtagaaacc |
| | cgcaaagagcagcaaccgctggccagttttcagaatgaggttcagccgagcacgcga |
| | catttttatgatgcacttcagggcgcacgcacggcgtttattctggagtgtaaaaaagcgt |
| | cgccgtcaaaaggcgtgatccgtgatgatttcgatccggcacgcattgccgccatttata |
| | aacattacgcttcggcaatttcagtgctgactgatgagaaatattttcaggggagctttgatt |
| | tcctccccatcgtcagccaaatcgccccgcagccgattttatgtaaagacttcattatcgat |
| | ccttaccagatctatctggcgcgctattaccaggccgatgcctgcttattaatgctttcagta |
| | ctggatgacgaacaatatcgccagcttgcagccgtcgcccacagtctggagatgggtgt |
| | gctgaccgaagtcagtaatgaagaggaactggagcgcgccattgcattgggggcaaa |
| | ggtcgttggcatcaacaaccgcgatctgcgcgatttgtcgattgatctcaaccgtacccg |
| | cgagcttgcgccgaaactggggcacaacgtgacggtaatcagcgaatccggcatcaat |
| | acttacgctcaggtgcgcgagttaagccacttcgctaacggctttctgattggttcggcgtt |
| | gatggcccatgacgatttgaacgccgccgtgcgtcgggtgttgctgggtgagaataaag |
| | tatgtggcctgacacgtgggcaagatgctaaagcagcttatgacgcgggcgcgatttac |
| | ggtgggttgatttttgttgcgacatcaccgcgttgcgtcaacgttgaacaggcgcaggaa |
| | gtgatggctgcagcaccgttgcagtatgttggcgtgttccgcaatcacgatattgccgatg |
| | tggcggacaaagctaaggtgttatcgctggcggcagtgcaactgcatggtaatgaagat |
| | cagctgtatatcgacaatctgcgtgaggctctgccagcacacgtcgccatctggaaggc |
| | tttaagtgtcggtgaaactcttcccgcgcgcgattttcagcacatcgataaatatgtattcg |
| | acaacggtcagggcgggagcggacaacgtttcgactggtcactattaaatggtcaatcg |
| | cttggcaacgttctgctggcggggggcttaggcgcagataactgcgtggaagcggcac |
| | aaaccggctgcgccgggcttgattttaattctgctgtagagtcgcaaccgggtatcaaag |
| | acgcacgtcttttggcctcggttttccagacgctgcgcgcatattaaggaaaggaacaat |
| | gacaacattacttaacccctattttggtgagtttggcggcatgtacgtgccacaaatcctga |
| | tgcctgctctgcgccagctggaagaagcttttgtcagcgcgcaaaaagatcctgaatttc |
| | aggctcagttcaacgacctgctgaaaaactatgccgggcgtccaaccgcgctgaccaa |
| | atgccagaacattacagccgggacgaacaccacgctgtatctgaagcgcgaagatttg |
| | ctgcacggcggcgcgcataaaactaaccaggtgctcggtcaggctttactggcgaagc |
| | ggatgggtaaaactgaaattattgccgaaaccggtgccggtcagcatggcgtggcgtc |
| | ggcccttgccagcgccctgctcggcctgaaatgccgaatttatatgggtgccaaagacg |
| | ttgaacgccagtcgcccaacgttttccggatgcgcttaatgggtgcggaagtgatcccg |
| | gtacatagcggttccgcgaccctgaaagatgcctgtaatgaggcgctacgcgactggtc |
| | cggcagttatgaaaccgcgcactatatgctgggtaccgcagctggcccgcatccttacc |
| | cgaccattgtgcgtgagtttcagcggatgattggcgaagaaacgaaagcgcagattctg |
| | gaaagagaaggtcgcctgccggatgccgttatcgcctgtgttggcggtggttcgaatgc |
| | catcggtatgtttgcagatttcatcaacgaaaccgacgtcggcctgattggtgtggagcct |
| | ggcggccacggtatcgaaactggcgagcacggcgcaccgttaaaacatggtcgcgtg |
| | ggcatctatttcggtatgaaagcgccgatgatgcaaaccgaagacgggcaaattgaaga |
| | gtcttactccatttctgccgggctggatttcccgtccgtcggcccgcaacatgcgtatctca |
| | acagcactggacgcgctgattacgtgtctattaccgacgatgaagccctggaagccttta |
| | aaacgctttgcctgcatgaagggatcatcccggcgctggaatcctcccacgccctggcc |
| | catgcgctgaaaatgatgcgcgaaaatccggaaaaagagcagctactggtggttaacct |
| | ttccggtcgcggcgataaagacatcttcaccgttcacgatattttgaaagcacgagggga |
| | aatctgatggaacgctacgaatctctgtttgcccagttgaaggagcgcaaagaaggcgc |
| | attcgttccttcgtcaccctcggtgatccgggcattgagcagtcgttgaaaattatcgata |
| | cgctaattgaagccggtgctgacgcgctggagttaggcatccccttctccgacccactg |
| | gcggatggcccgacgattcaaaacgccacactgcgtgcttttgcggcgggagtaaccc |
| | cggcgcagtgctttgagatgctggcactcattcgccagaagcacccgaccattcccatc |
| | ggccttttgatgtatgccaacctggtgtttaacaaaggcattgatgagttttatgccgagtg |
| | cgagaaagtcggcgtcgattcggtgctggttgccgatgtgcccgtggaagagtccgcg |
| | cccttccgccaggccgcgttgcgtcataatgtcgcacctatctttatttgcccgccgaatg |
| | ccgacgatgatttgctgcgccagatagcctcttacggtcgtggttacacctatttgctgtcg |
| | cgagcgggcgtgaccggcgcagaaaaccgcgccgcgttacccctcaatcatctggttg |
| | cgaagctgaaagagtacaacgctgcgcctccattgcagggatttggtatttccgccccg |
| | gatcaggtaaaagccgcgattgatgcaggagctgcgggcgcgatttctggttcggccat |
| | cgttaaaatcatcgagcaacatattaatgagccagagaaaatgctggcggcactgaaag |
| | cttttgtacaaccgatgaaagcggcgacgcgcagtta |
| fbrS40FTrpE- | ctctagaaataattttgtttaactttaagaaggagatatacatatgcaaacacaaaaaccga |
| DCBA (leader | ctctcgaactgctaacctgcgaaggcgcttatcgcgacaacccgactgcgctttttcacc |
| region and RBS | agttgtgtggggatcgtccggcaacgctgctgctggaattcgcagatatcgacagcaaa |
| underlined) | gatgatttaaaaagcctgctgctggtagacagtgcgctgcgcattacagcattaagtgac |
| SEQ ID NO: 273 | actgtcacaatccaggcgctttccggcaatggagaagccctgttgacactactggataac |
| | gccttgcctgcgggtgtggaaaatgaacaatcaccaaactgccgcgtactgcgcttccc |
| | gcctgtcagtccactgctggatgaagacgcccgcttatgctccctttcggtttttgacgcttt |
| | ccgcttattacagaatctgttgaatgtaccgaaggaagaacgagaagcaatgttcttcgg |
| | cggcctgttctcttatgaccttgtggcgggatttgaaaatttaccgcaactgtcagcggaa |
| | aatagctgccctgatttctgtttttatctcgctgaaacgctgatggtgattgaccatcagaaa |
| | aaaagcactcgtattcaggccagcctgtttgctccgaatgaagaagaaaaacaacgtctc |
| | actgctcgcctgaacgaactacgtcagcaactgaccgaagccgcgccgccgctgccg |
| | gtggtttccgtgccgcatatgcgttgtgaatgtaaccagagcgatgaagagttcggtggt |
| | gtagtgcgtttgttgcaaaaagcgattcgcgccggagaaattttccaggtggtgccatctc |
| | gccgtttctctctgccctgcccgtcaccgctggcagcctattacgtgctgaaaaagagta |
| | atcccagcccgtacatgttttttatgcaggataatgatttcaccctgtttggcgcgtcgccg |
| | gaaagttcgctcaagtatgacgccaccagccgccagattgagatttacccgattgccgg |
| | aacacgtccacgcggtcgtcgtgccgatggttcgctggacagagacctcgacagccgc |
| | atcgaactggagatgcgtaccgatcataaagagctttctgaacatctgatgctggtggatc |
| | tcgcccgtaatgacctggcacgcatttgcacacccggcagccgctacgtcgccgatctc |
| | accaaagttgaccgttactcttacgtgatgcacctagtctcccgcgttgttggtgagctgc |
| | gccacgatctcgacgccctgcacgcttaccgcgcctgtatgaatatggggacgttaagc |
| | ggtgcaccgaaagtacgcgctatgcagttaattgccgaagcagaaggtcgtcgacgcg |
| | gcagctacggcggcgcggtaggttattttaccgcgcatggcgatctcgacacctgcatt |
| | gtgatccgctcggcgctggtggaaaacggtatcgccaccgtgcaagccggtgctggcg |
| | tagtccttgattctgttccgcagtcggaagccgacgaaactcgtaataaagcccgcgctg |
| | tactgcgcgctattgccaccgcgcatcatgcacaggagacgttctaatggctgacattct |
| | gctgctcgataatatcgactcttttacgtacaacctggcagatcagttgcgcagcaatggt |
| | cataacgtggtgatttaccgcaaccatattccggcgcagaccttaattgaacgcctggcg |
| | acgatgagcaatccggtgctgatgctttctcctggccccggtgtgccgagcgaagccgg |
| | ttgtatgccggaactcctcacccgcttgcgtggcaagctgccaattattggcatttgcctc |
| | ggacatcaggcgattgtcgaagcttacgggggctatgtcggtcaggcgggcgaaattct |
| | tcacggtaaagcgtcgagcattgaacatgacggtcaggcgatgtttgccggattaacaa |
| | acccgctgccagtggcgcgttatcactcgctggttggcagtaacattccggccggtttaa |
| | ccatcaacgcccattttaatggcatggtgatggcggtgcgtcacgatgcagatcgcgttt |
| | gtggattccagttccatccggaatccattcttactacccagggcgctcgcctgctggaac |
| | aaacgctggcctgggcgcagcagaaactagagccaaccaacacgctgcaaccgattc |
| | tggaaaaactgtatcaggcacagacgcttagccaacaagaaagccaccagctgttttca |
| | gcggtggtacgtggcgagctgaagccggaacaactggcggcggcgctggtgagcat |
| | gaaaattcgcggtgaacacccgaacgagatcgccggggcagcaaccgcgctactgga |
| | aaacgccgcgccattcccgcgcccggattatctgtttgccgatatcgtcggtactggcgg |
| | tgacggcagcaacagcatcaatatttctaccgccagtgcgtttgtcgccgcggcctgcg |
| | ggctgaaagtggcgaaacacggcaaccgtagcgtctccagtaaatccggctcgtcgga |
| | tctgctggcggcgttcggtattaatcttgatatgaacgccgataaatcgcgccaggcgct |
| | ggatgagttaggcgtctgtttcctctttgcgccgaagtatcacaccggattccgccatgcg |
| | atgccggttcgccagcaactgaaaacccgcactctgttcaacgtgctgggaccattgatt |
| | aacccggcgcatccgccgctggcgctaattggtgtttatagtccggaactggtgctgcc |
| | gattgccgaaaccttgcgcgtgctggggtatcaacgcgcggcagtggtgcacagcggc |
| | gggatggatgaagtttcattacacgcgccgacaatcgttgccgaactacatgacggcga |
| | aattaagagctatcaattgaccgctgaagattttggcctgacaccctaccaccaggagca |
| | attggcaggcggaacaccggaagaaaaccgtgacattttaacacgcttgttacaaggta |
| | aaggcgacgccgcccatgaagcagccgtcgcggcgaatgtcgccatgttaatgcgcct |
| | gcatggccatgaagatctgcaagccaatgcgcaaaccgttcttgaggtactgcgcagtg |
| | gttccgcttacgacagagtcaccgcactggcggcacgagggtaaatgatgcaaaccgtt |
| | ttagcgaaaatcgtcgcagacaaggcgatttgggtagaaacccgcaaagagcagcaac |
| | cgctggccagttttcagaatgaggttcagccgagcacgcgacatttttatgatgcacttca |
| | gggcgcacgcacggcgtttattctggagtgtaaaaaagcgtcgccgtcaaaaggcgtg |
| | atccgtgatgatttcgatccggcacgcattgccgccatttataaacattacgcttcggcaat |
| | ttcagtgctgactgatgagaaatattttcaggggagctttgatttcctccccatcgtcagcc |
| | aaatcgccccgcagccgattttatgtaaagacttcattatcgatccttaccagatctatctg |
| | gcgcgctattaccaggccgatgcctgcttattaatgctttcagtactggatgacgaacaat |
| | atcgccagcttgcagccgtcgcccacagtctggagatgggtgtgctgaccgaagtcagt |
| | aatgaagaggaactggagcgcgccattgcattgggggcaaaggtcgttggcatcaaca |
| | accgcgatctgcgcgatttgtcgattgatctcaaccgtacccgcgagcttgcgccgaaac |
| | tggggcacaacgtgacggtaatcagcgaatccggcatcaatacttacgctcaggtgcgc |
| | gagttaagccacttcgctaacggctttctgattggttcggcgttgatggcccatgacgattt |
| | gaacgccgccgtgcgtcgggtgttgctgggtgagaataaagtatgtggcctgacacgtg |
| | ggcaagatgctaaagcagcttatgacgcgggcgcgatttacggtgggttgatttttgttgc |
| | gacatcaccgcgttgcgtcaacgttgaacaggcgcaggaagtgatggctgcagcaccg |
| | ttgcagtatgttggcgtgttccgcaatcacgatattgccgatgtggcggacaaagctaag |
| | gtgttatcgctggcggcagtgcaactgcatggtaatgaagatcagctgtatatcgacaat |
| | ctgcgtgaggctctgccagcacacgtcgccatctggaaggctttaagtgtcggtgaaact |
| | cttcccgcgcgcgattttcagcacatcgataaatatgtattcgacaacggtcagggcggg |
| | agcggacaacgtttcgactggtcactattaaatggtcaatcgcttggcaacgttctgctgg |
| | cggggggcttaggcgcagataactgcgtggaagcggcacaaaccggctgcgccggg |
| | cttgattttaattctgctgtagagtcgcaaccgggtatcaaagacgcacgtcttttggcctc |
| | ggttttccagacgctgcgcgcatattaaggaaaggaacaatgacaacattacttaacccc |
| | tattttggtgagtttggcggcatgtacgtgccacaaatcctgatgcctgctctgcgccagct |
| | ggaagaagcttttgtcagcgcgcaaaaagatcctgaatttcaggctcagttcaacgacct |
| | gctgaaaaactatgccgggcgtccaaccgcgctgaccaaatgccagaacattacagcc |
| | gggacgaacaccacgctgtatctgaagcgcgaagatttgctgcacggcggcgcgcata |
| | aaactaaccaggtgctcggtcaggctttactggcgaagcggatgggtaaaactgaaatt |
| | attgccgaaaccggtgccggtcagcatggcgtggcgtcggcccttgccagcgccctgc |
| | tcggcctgaaatgccgaatttatatgggtgccaaagacgttgaacgccagtcgcccaac |
| | gttttccggatgcgcttaatgggtgcggaagtgatcccggtacatagcggttccgcgacc |
| | ctgaaagatgcctgtaatgaggcgctacgcgactggtccggcagttatgaaaccgcgc |
| | actatatgctgggtaccgcagctggcccgcatccttacccgaccattgtgcgtgagtttca |
| | gcggatgattggcgaagaaacgaaagcgcagattctggaaagagaaggtcgcctgcc |
| | ggatgccgttatcgcctgtgttggcggtggttcgaatgccatcggtatgtttgcagatttca |
| | tcaacgaaaccgacgtcggcctgattggtgtggagcctggcggccacggtatcgaaac |
| | tggcgagcacggcgcaccgttaaaacatggtcgcgtgggcatctatttcggtatgaaag |
| | cgccgatgatgcaaaccgaagacgggcaaattgaagagtcttactccatttctgccggg |
| | ctggatttcccgtccgtcggcccgcaacatgcgtatctcaacagcactggacgcgctgat |
| | tacgtgtctattaccgacgatgaagccctggaagcctttaaaacgctttgcctgcatgaag |
| | ggatcatcccggcgctggaatcctcccacgccctggcccatgcgctgaaaatgatgcg |
| | cgaaaatccggaaaaagagcagctactggtggttaacctttccggtcgcggcgataaag |
| | acatcttcaccgttcacgatattttgaaagcacgaggggaaatctgatggaacgctacga |
| | atctctgtttgcccagttgaaggagcgcaaagaaggcgcattcgttcctttcgtcaccctc |
| | ggtgatccgggcattgagcagtcgttgaaaattatcgatacgctaattgaagccggtgct |
| | gacgcgctggagttaggcatccccttctccgacccactggcggatggcccgacgattca |
| | aaacgccacactgcgtgcttttgcggcgggagtaaccccggcgcagtgctttgagatgc |
| | tggcactcattcgccagaagcacccgaccattcccatcggccttttgatgtatgccaacct |
| | ggtgtttaacaaaggcattgatgagttttatgccgagtgcgagaaagtcggcgtcgattc |
| | ggtgctggttgccgatgtgcccgtggaagagtccgcgcccttccgccaggccgcgttg |
| | cgtcataatgtcgcacctatctttatttgcccgccgaatgccgacgatgatttgctgcgcca |
| | gatagcctcttacggtcgtggttacacctatttgctgtcgcgagcgggcgtgaccggcgc |
| | agaaaaccgcgccgcgttacccctcaatcatctggttgcgaagctgaaagagtacaacg |
| | ctgcgcctccattgcagggatttggtatttccgccccggatcaggtaaaagccgcgattg |
| | atgcaggagctgcgggcgcgatttctggttcggccatcgttaaaatcatcgagcaacata |
| | ttaatgagccagagaaaatgctggcggcactgaaagcttttgtacaaccgatgaaagcg |
| | gcgacgcgcagttaa |
| fbrTrpE | atgcaaacacaaaaaccgactctcgaactgctaacctgcgaaggcgcttatcgcgacaa |
| SEQ ID NO: 274 | cccgactgcgctttttcaccagttgtgtggggatcgtccggcaacgctgctgctggaattc |
| | gcagatatcgacagcaaagatgatttaaaaagcctgctgctggtagacagtgcgctgcg |
| | cattacagcattaagtgacactgtcacaatccaggcgctttccggcaatggagaagccct |
| | gttgacactactggataacgccttgcctgcgggtgtggaaaatgaacaatcaccaaactg |
| | ccgcgtactgcgcttcccgcctgtcagtccactgctggatgaagacgcccgcttatgctc |
| | cctttcggtttttgacgctttccgcttattacagaatctgttgaatgtaccgaaggaagaacg |
| | agaagcaatgttcttcggcggcctgttctcttatgaccttgtggcgggatttgaaaatttac |
| | cgcaactgtcagcggaaaatagctgccctgatttctgtttttatctcgctgaaacgctgatg |
| | gtgattgaccatcagaaaaaaagcactcgtattcaggccagcctgtttgctccgaatgaa |
| | gaagaaaaacaacgtctcactgctcgcctgaacgaactacgtcagcaactgaccgaag |
| | ccgcgccgccgctgccggtggtttccgtgccgcatatgcgttgtgaatgtaaccagagc |
| | gatgaagagttcggtggtgtagtgcgtttgttgcaaaaagcgattcgcgccggagaaatt |
| | ttccaggtggtgccatctcgccgtttctctctgccctgcccgtcaccgctggcagcctatta |
| | cgtgctgaaaaagagtaatcccagcccgtacatgttttttatgcaggataatgatttcaccc |
| | tgtttggcgcgtcgccggaaagttcgctcaagtatgacgccaccagccgccagattgag |
| | atttacccgattgccggaacacgtccacgcggtcgtcgtgccgatggttcgctggacag |
| | agacctcgacagccgcatcgaactggagatgcgtaccgatcataaagagctttctgaac |
| | atctgatgctggtggatctcgcccgtaatgacctggcacgcatttgcacacccggcagc |
| | cgctacgtcgccgatctcaccaaagttgaccgttactcttacgtgatgcacctagtctccc |
| | gcgttgttggtgagctgcgccacgatctcgacgccctgcacgcttaccgcgcctgtatga |
| | atatggggacgttaagcggtgcaccgaaagtacgcgctatgcagttaattgccgaagca |
| | gaaggtcgtcgacgcggcagctacggcggcgcggtaggttattttaccgcgcatggcg |
| | atctcgacacctgcattgtgatccgctcggcgctggtggaaaacggtatcgccaccgtg |
| | caagccggtgcggcgtagtccttgattctgttccgcagtcggaagccgacgaaactcgt |
| | aataaagcccgcgctgtactgcgcgctattgccaccgcgcatcatgcacaggagacgtt |
| | cta |
| trpDH- | ctctagaaataattttgtttaactttaagaaggagatatacatatgaattatcagaacgacga |
| fldABCDaculfldH | tttacgcatcaaagaaatcaaagagttacttcctcctgtcgcattgctggaaaaattccccg |
| (leader region and | ctactgaaaatgccgcgaatacggtcgcccatgcccgaaaagcgatccataagatcctg |
| RBS underlined) | aaaggtaatgatgatcgcctgttggtggtgattggcccatgctcaattcatgatcctgtcgc |
| SEQ ID NO: 275 | ggctaaagagtatgccactcgcttgctgacgctgcgtgaagagctgcaagatgagctgg |
| | aaatcgtgatgcgcgtctattttgaaaagccgcgtactacggtgggctggaaagggctg |
| | attaacgatccgcatatggataacagcttccagatcaacgacggtctgcgtattgcccgc |
| | aaattgctgctcgatattaacgacagcggtctgccagcggcgggtgaattcctggatatg |
| | atcaccctacaatatctcgctgacctgatgagctggggcgcaattggcgcacgtaccac |
| | cgaatcgcaggtgcaccgcgaactggcgtctggtctttcttgtccggtaggtttcaaaaat |
| | ggcactgatggtacgattaaagtggctatcgatgccattaatgccgccggtgcgccgca |
| | ctgcttcctgtccgtaacgaaatgggggcattcggcgattgtgaataccagcggtaacg |
| | gcgattgccatatcattctgcgcggcggtaaagagcctaactacagcgcgaagcacgtt |
| | gctgaagtgaaagaagggctgaacaaagcaggcctgccagcgcaggtgatgatcgat |
| | ttcagccatgctaactcgtcaaaacaattcaaaaagcagatggatgtttgtactgacgtttg |
| | ccagcagattgccggtggcgaaaaggccattattggcgtgatggtggaaagccatctg |
| | gtggaaggcaatcagagcctcgagagcggggaaccgctggcctacggtaagagcatc |
| | accgatgcctgcattggctgggatgataccgatgctctgttacgtcaactggcgagtgca |
| | gtaaaagcgcgtcgcgggtaaTACTtaagaaggagatatacatATGCTGTT |
| | ATTCGAGACTGTGCGTGAAATGGGTCATGAGCAAGT |
| | CCTTTTCTGTCATAGCAAGAATCCCGAGATCAAGGCA |
| | ATTATCGCAATCCACGATACCACCTTAGGACCGGCTA |
| | TGGGCGCAACTCGTATCTTACCTTATATTAATGAGGA |
| | GGCTGCCCTGAAAGATGCATTACGTCTGTCCCGCGGA |
| | ATGACTTACAAAGCAGCCTGCGCCAATATTCCCGCCG |
| | GGGGCGGCAAAGCCGTCATCATCGCTAACCCCGAAA |
| | ACAAGACCGATGACCTGTTACGCGCATACGGCCGTTT |
| | CGTGGACAGCTTGAACGGCCGTTTCATCACCGGGCAG |
| | GACGTTAACATTACGCCCGACGACGTTCGCACTATTT |
| | CGCAGGAGACTAAGTACGTGGTAGGCGTCTCAGAAA |
| | AGTCGGGAGGGCCGGCACCTATCACCTCTCTGGGAGT |
| | ATTTTTAGGCATCAAAGCCGCTGTAGAGTCGCGTTGG |
| | CAGTCTAAACGCCTGGATGGCATGAAAGTGGCGGTG |
| | CAAGGACTTGGGAACGTAGGAAAAAATCTTTGTCGC |
| | CATCTGCATGAACACGATGTACAACTTTTTGTGTCTG |
| | ATGTCGATCCAATCAAGGCCGAGGAAGTAAAACGCT |
| | TATTCGGGGCGACTGTTGTCGAACCGACTGAAATCTA |
| | TTCTTTAGATGTTGATATTTTTGCACCGTGTGCACTTG |
| | GGGGTATTTTGAATAGCCATACCATCCCGTTCTTACA |
| | AGCCTCAATCATCGCAGGAGCAGCGAATAACCAGCT |
| | GGAGAACGAGCAACTTCATTCGCAGATGCTTGCGAA |
| | AAAGGGTATTCTTTACTCACCAGACTACGTTATCAAT |
| | GCAGGAGGACTTATCAATGTTTATAACGAAATGATCG |
| | GATATGACGAGGAAAAAGCATTCAAACAAGTTCATA |
| | ACATCTACGATACGTTATTAGCGATTTTCGAAATTGC |
| | AAAAGAACAAGGTGTAACCACCAACGACGCGGCCCG |
| | TCGTTTAGCAGAGGATCGTATCAACAACTCCAAACGC |
| | TCAAAGAGTAAAGCGATTGCGGCGTGAAATGtaagaagg |
| | agatatacatATGGAAAACAACACCAATATGTTCTCTGGAG |
| | TGAAGGTGATCGAACTGGCCAACTTTATCGCTGCTCC |
| | GGCGGCAGGTCGCTTCTTTGCTGATGGGGGAGCAGA |
| | AGTAATTAAGATCGAATCTCCAGCAGGCGACCCGCT |
| | GCGCTACACGGCCCCATCAGAAGGACGCCCGCTTTCT |
| | CAAGAGGAAAACACAACGTATGATTTGGAAAACGCG |
| | AATAAGAAAGCAATTGTTCTGAACTTAAAATCGGAA |
| | AAAGGAAAGAAAATTCTTCACGAGATGCTTGCTGAG |
| | GCAGACATCTTGTTAACAAATTGGCGCACGAAAGCG |
| | TTAGTCAAACAGGGGTTAGATTACGAAACACTGAAA |
| | GAGAAGTATCCAAAATTGGTATTTGCACAGATTACAG |
| | GATACGGGGAGAAAGGACCCGACAAAGACCTGCCTG |
| | GTTTCGACTACACGGCGTTTTTCGCCCGCGGAGGAGT |
| | CTCCGGTACATTATATGAAAAAGGAACTGTCCCTCCT |
| | AATGTGGTACCGGGTCTGGGTGACCACCAGGCAGGA |
| | ATGTTCTTAGCTGCCGGTATGGCTGGTGCGTTGTATA |
| | AGGCCAAAACCACCGGACAAGGCGACAAAGTCACCG |
| | TTAGTCTGATGCATAGCGCAATGTACGGCCTGGGAAT |
| | CATGATTCAGGCAGCCCAGTACAAGGACCATGGGCT |
| | GGTGTACCCGATCAACCGTAATGAAACGCCTAATCCT |
| | TTCATCGTTTCATACAAGTCCAAAGATGATTACTTTG |
| | TCCAAGTTTGCATGCCTCCCTATGATGTGTTTTATGAT |
| | CGCTTTATGACGGCCTTAGGACGTGAAGACTTGGTAG |
| | GTGACGAACGCTACAATAAGATCGAGAACTTGAAGG |
| | ATGGTCGCGCAAAAGAAGTCTATTCCATCATCGAACA |
| | ACAAATGGTAACGAAGACGAAGGACGAATGGGACA |
| | AGATTTTTCGTGATGCAGACATTCCATTCGCTATTGC |
| | CCAAACGTGGGAAGATCTTTTAGAAGACGAGCAGGC |
| | ATGGGCCAACGACTACCTGTATAAAATGAAGTATCCC |
| | ACAGGCAACGAACGTGCCCTGGTACGTTTACCTGTGT |
| | TCTTCAAAGAAGCTGGACTTCCTGAATACAACCAGTC |
| | GCCACAGATTGCTGAGAATACCGTGGAAGTGTTAAA |
| | GGAGATGGGATATACCGAGCAAGAAATTGAGGAGCT |
| | TGAGAAAGACAAAGACATCATGGTACGTAAAGAGAA |
| | ATGAAGGTtaagaaggagatatacatATGTCAGACCGCAACAA |
| | AGAAGTGAAAGAAAAGAAGGCTAAACACTATCTGCG |
| | CGAGATCACAGCTAAACACTACAAGGAAGCGTTAGA |
| | GGCTAAAGAGCGTGGGGAGAAAGTGGGTTGGTGTGC |
| | CTCTAACTTCCCCCAAGAGATTGCAACCACGTTGGGT |
| | GTAAAGGTTGTTTATCCCGAAAACCACGCCGCCGCCG |
| | TAGCGGCACGTGGCAATGGGCAAAATATGTGCGAAC |
| | ACGCGGAGGCTATGGGATTCAGTAATGATGTGTGTG |
| | GATATGCACGTGTAAATTTAGCCGTAATGGACATCGG |
| | CCATAGTGAAGATCAACCTATTCCAATGCCTGATTTC |
| | GTTCTGTGCTGTAATAATATCTGCAATCAGATGATTA |
| | AATGGTATGAACACATTGCAAAAACGTTGGATATTCC |
| | TATGATCCTTATCGATATTCCATATAATACTGAGAAC |
| | ACGGTGTCTCAGGACCGCATTAAGTACATCCGCGCCC |
| | AGTTCGATGACGCTATCAAGCAACTGGAAGAAATCA |
| | CTGGCAAAAAGTGGGACGAGAATAAATTCGAAGAAG |
| | TGATGAAGATTTCGCAAGAATCGGCCAAGCAATGGT |
| | TACGCGCCGCGAGCTACGCGAAATACAAACCATCAC |
| | CGTTTTCGGGCTTTGACCTTTTTAATCACATGGCTGTA |
| | GCCGTTTGTGCTCGCGGCACCCAGGAAGCCGCCGATG |
| | CATTCAAAATGTTAGCAGATGAATATGAAGAGAACG |
| | TTAAGACAGGAAAGTCTACTTATCGCGGCGAGGAGA |
| | AGCAGCGTATCTTGTTCGAGGGCATCGCTTGTTGGCC |
| | TTATCTGCGCCACAAGTTGACGAAACTGAGTGAATAT |
| | GGAATGAACGTCACAGCTACGGTGTACGCCGAAGCT |
| | TTTGGGGTTATTTACGAAAACATGGATGAACTGATGG |
| | CCGCTTACAATAAAGTGCCTAACTCAATCTCCTTCGA |
| | GAACGCGCTGAAGATGCGTCTTAATGCCGTTACAAGC |
| | ACCAATACAGAAGGGGCTGTTATCCACATTAATCGCA |
| | GTTGTAAGCTGTGGTCAGGATTCTTATACGAACTGGC |
| | CCGTCGTTTGGAAAAGGAGACGGGGATCCCTGTTGTT |
| | TCGTTCGACGGAGATCAAGCGGATCCCCGTAACTTCT |
| | CCGAGGCTCAATATGACACTCGCATCCAAGGTTTAAA |
| | TGAGGTGATGGTCGCGAAAAAAGAAGCAGAGTGAGC |
| | TTtaagaaggagatatacatATGTCGAATAGTGACAAGTTTTTT |
| | AACGACTTCAAGGACATTGTGGAAAACCCAAAGAAG |
| | TATATCATGAAGCATATGGAACAAACGGGACAAAAA |
| | GCCATCGGTTGCATGCCTTTATACACCCCAGAAGAGC |
| | TTGTCTTAGCGGCGGGTATGTTTCCTGTTGGAGTATG |
| | GGGCTCGAATACTGAGTTGTCAAAAGCCAAGACCTA |
| | CTTTCCGGCTTTTATCTGTTCTATCTTGCAAACTACTT |
| | TAGAAAACGCATTGAATGGGGAGTATGACATGCTGT |
| | CTGGTATGATGATCACAAACTATTGCGATTCGCTGAA |
| | ATGTATGGGACAAAACTTCAAACTTACAGTGGAAAA |
| | TATCGAATTCATCCCGGTTACGGTTCCACAAAACCGC |
| | AAGATGGAGGCGGGTAAAGAATTTCTGAAATCCCAG |
| | TATAAAATGAATATCGAACAACTGGAAAAAATCTCA |
| | GGGAATAAGATCACTGACGAGAGCTTGGAGAAGGCT |
| | ATTGAAATTTACGATGAGCACCGTAAAGTCATGAAC |
| | GATTTCTCTATGCTTGCGTCCAAGTACCCTGGTATCAT |
| | TACGCCAACGAAACGTAACTACGTGATGAAGTCAGC |
| | GTATTATATGGACAAGAAAGAACATACAGAGAAGGT |
| | ACGTCAGTTGATGGATGAAATCAAGGCCATTGAGCCT |
| | AAACCATTCGAAGGAAAACGCGTGATTACCACTGGG |
| | ATCATTGCAGATTCGGAGGACCTTTTGAAAATCTTGG |
| | AGGAGAATAACATTGCTATCGTGGGAGATGATATTG |
| | CACACGAGTCTCGCCAATACCGCACTTTGACCCCGGA |
| | GGCCAACACACCTATGGACCGTCTTGCTGAACAATTT |
| | GCGAACCGCGAGTGTTCGACGTTGTATGACCCTGAAA |
| | AAAAACGTGGACAGTATATTGTCGAGATGGCAAAAG |
| | AGCGTAAGGCCGACGGAATCATCTTCTTCATGACAAA |
| | ATTCTGCGATCCCGAAGAATACGATTACCCTCAGATG |
| | AAAAAAGACTTCGAAGAAGCCGGTATTCCCCACGTT |
| | CTGATTGAGACAGACATGCAAATGAAGAACTACGAA |
| | CAAGCTCGCACCGCTATTCAAGCATTTTCAGAAACCC |
| | TTTGACGCTtaagaaggagatatacatATGCGTGCTGTCTTAAT |
| | CGAGAAGTCAGATGACACCCAGAGTGTTTCAGTTAC |
| | GGAGTTGGCTGAAGACCAATTACCCGAAGGTGACGT |
| | CCTTGTGGATGTCGCGTACAGCACATTGAATTACAAG |
| | GATGCTCTTGCGATTACTGGAAAAGCACCCGTTGTAC |
| | GCCGTTTTCCTATGGTCCCCGGAATTGACTTTACTGG |
| | GACTGTCGCACAGAGTTCCCATGCTGATTTCAAGCCA |
| | GGCGACCGCGTAATTCTGAACGGATGGGGAGTTGGT |
| | GAGAAACACTGGGGCGGTCTTGCAGAACGCGCACGC |
| | GTACGTGGGGACTGGCTTGTCCCGTTGCCAGCCCCCT |
| | TAGACTTGCGCCAGGCTGCAATGATTGGCACTGCGGG |
| | GTACACAGCTATGCTGTGCGTGCTTGCCCTTGAGCGC |
| | CATGGAGTCGTACCTGGGAACGGCGAGATTGTCGTCT |
| | CAGGCGCAGCAGGAGGGGTAGGTTCTGTAGCAACCA |
| | CACTGTTAGCAGCCAAAGGCTACGAAGTGGCCGCCG |
| | TGACCGGGCGCGCAAGCGAGGCCGAATATTTACGCG |
| | GATTAGGCGCCGCGTCGGTCATTGATCGCAATGAATT |
| | AACGGGGAAGGTGCGTCCATTAGGGCAGGAACGCTG |
| | GGCAGGAGGAATCGATGTAGCAGGATCAACCGTACT |
| | TGCTAATATGTTGAGCATGATGAAATACCGTGGCGTG |
| | GTGGCGGCCTGTGGCCTGGCGGCTGGAATGGACTTGC |
| | CCGCGTCTGTCGCCCCTTTTATTCTGCGTGGTATGACT |
| | TTGGCAGGGGTAGATTCAGTCATGTGCCCCAAAACTG |
| | ATCGTCTGGCTGCTTGGGCACGCCTGGCATCCGACCT |
| | GGACCCTGCAAAGCTGGAAGAGATGACAACTGAATT |
| | ACCGTTCTCTGAGGTGATTGAAACGGCTCCGAAGTTC |
| | TTGGATGGAACAGTGCGTGGGCGTATTGTCATTCCGG |
| | TAACACCTTGATACTtaagaaggagatatacatATGAAAATCTT |
| | GGCATACTGCGTCCGCCCAGACGAGGTAGACTCCTTT |
| | AAGAAATTTAGTGAAAAGTACGGGCATACAGTTGAT |
| | CTTATTCCAGACTCTTTTGGACCTAATGTCGCTCATTT |
| | GGCGAAGGGTTACGATGGGATTTCTATTCTGGGCAAC |
| | GACACGTGTAACCGTGAGGCACTGGAGAAGATCAAG |
| | GATTGCGGGATCAAATATCTGGCAACCCGTACAGCC |
| | GGAGTGAACAACATTGACTTCGATGCAGCAAAGGAG |
| | TTCGGTATTAACGTGGCTAATGTTCCCGCATATTCCC |
| | CCAACTCGGTCAGCGAATTTACCATTGGATTGGCATT |
| | AAGTCTGACGCGTAAGATTCCATTTGCCCTGAAACGC |
| | GTGGAACTGAACAATTTTGCGCTTGGCGGCCTTATTG |
| | GTGTGGAATTGCGTAACTTAACTTTAGGAGTCATCGG |
| | TACTGGTCGCATCGGATTGAAAGTGATTGAGGGCTTC |
| | TCTGGGTTTGGAATGAAAAAAATGATCGGTTATGACA |
| | TTTTTGAAAATGAAGAAGCAAAGAAGTACATCGAAT |
| | ACAAATCATTAGACGAAGTTTTTAAAGAGGCTGATAT |
| | TATCACTCTGCATGCGCCTCTGACAGACGACAACTAT |
| | CATATGATTGGTAAAGAATCCATTGCTAAAATGAAG |
| | GATGGGGTATTTATTATCAACGCAGCGCGTGGAGCCT |
| | TAATCGATAGTGAGGCCCTGATTGAAGGGTTAAAATC |
| | GGGGAAGATT |
| fldA | ATGGAAAACAACACCAATATGTTCTCTGGAGTGAAG |
| SEQ ID NO: 276 | GTGATCGAACTGGCCAACTTTATCGCTGCTCCGGCGG |
| | CAGGTCGCTTCTTTGCTGATGGGGGAGCAGAAGTAAT |
| | TAAGATCGAATCTCCAGCAGGCGACCCGCTGCGCTAC |
| | ACGGCCCCATCAGAAGGACGCCCGCTTTCTCAAGAG |
| | GAAAACACAACGTATGATTTGGAAAACGCGAATAAG |
| | AAAGCAATTGTTCTGAACTTAAAATCGGAAAAAGGA |
| | AAGAAAATTCTTCACGAGATGCTTGCTGAGGCAGAC |
| | ATCTTGTTAACAAATTGGCGCACGAAAGCGTTAGTCA |
| | AACAGGGGTTAGATTACGAAACACTGAAAGAGAAGT |
| | ATCCAAAATTGGTATTTGCACAGATTACAGGATACGG |
| | GGAGAAAGGACCCGACAAAGACCTGCCTGGTTTCGA |
| | CTACACGGCGTTTTTCGCCCGCGGAGGAGTCTCCGGT |
| | ACATTATATGAAAAAGGAACTGTCCCTCCTAATGTGG |
| | TACCGGGTCTGGGTGACCACCAGGCAGGAATGTTCTT |
| | AGCTGCCGGTATGGCTGGTGCGTTGTATAAGGCCAAA |
| | ACCACCGGACAAGGCGACAAAGTCACCGTTAGTCTG |
| | ATGCATAGCGCAATGTACGGCCTGGGAATCATGATTC |
| | AGGCAGCCCAGTACAAGGACCATGGGCTGGTGTACC |
| | CGATCAACCGTAATGAAACGCCTAATCCTTTCATCGT |
| | TTCATACAAGTCCAAAGATGATTACTTTGTCCAAGTT |
| | TGCATGCCTCCCTATGATGTGTTTTATGATCGCTTTAT |
| | GACGGCCTTAGGACGTGAAGACTTGGTAGGTGACGA |
| | ACGCTACAATAAGATCGAGAACTTGAAGGATGGTCG |
| | CGCAAAAGAAGTCTATTCCATCATCGAACAACAAAT |
| | GGTAACGAAGACGAAGGACGAATGGGACAAGATTTT |
| | TCGTGATGCAGACATTCCATTCGCTATTGCCCAAACG |
| | TGGGAAGATCTTTTAGAAGACGAGCAGGCATGGGCC |
| | AACGACTACCTGTATAAAATGAAGTATCCCACAGGC |
| | AACGAACGTGCCCTGGTACGTTTACCTGTGTTCTTCA |
| | AAGAAGCTGGACTTCCTGAATACAACCAGTCGCCAC |
| | AGATTGCTGAGAATACCGTGGAAGTGTTAAAGGAGA |
| | TGGGATATACCGAGCAAGAAATTGAGGAGCTTGAGA |
| | AAGACAAAGACATCATGGTACGTAAAGAGAAATGA |
| fldB | ATGTCAGACCGCAACAAAGAAGTGAAAGAAAAGAA |
| SEQ ID NO: 277 | GGCTAAACACTATCTGCGCGAGATCACAGCTAAACA |
| | CTACAAGGAAGCGTTAGAGGCTAAAGAGCGTGGGGA |
| | GAAAGTGGGTTGGTGTGCCTCTAACTTCCCCCAAGAG |
| | ATTGCAACCACGTTGGGTGTAAAGGTTGTTTATCCCG |
| | AAAACCACGCCGCCGCCGTAGCGGCACGTGGCAATG |
| | GGCAAAATATGTGCGAACACGCGGAGGCTATGGGAT |
| | TCAGTAATGATGTGTGTGGATATGCACGTGTAAATTT |
| | AGCCGTAATGGACATCGGCCATAGTGAAGATCAACC |
| | TATTCCAATGCCTGATTTCGTTCTGTGCTGTAATAATA |
| | TCTGCAATCAGATGATTAAATGGTATGAACACATTGC |
| | AAAAACGTTGGATATTCCTATGATCCTTATCGATATT |
| | CCATATAATACTGAGAACACGGTGTCTCAGGACCGC |
| | ATTAAGTACATCCGCGCCCAGTTCGATGACGCTATCA |
| | AGCAACTGGAAGAAATCACTGGCAAAAAGTGGGACG |
| | AGAATAAATTCGAAGAAGTGATGAAGATTTCGCAAG |
| | AATCGGCCAAGCAATGGTTACGCGCCGCGAGCTACG |
| | CGAAATACAAACCATCACCGTTTTCGGGCTTTGACCT |
| | TTTTAATCACATGGCTGTAGCCGTTTGTGCTCGCGGC |
| | ACCCAGGAAGCCGCCGATGCATTCAAAATGTTAGCA |
| | GATGAATATGAAGAGAACGTTAAGACAGGAAAGTCT |
| | ACTTATCGCGGCGAGGAGAAGCAGCGTATCTTGTTCG |
| | AGGGCATCGCTTGTTGGCCTTATCTGCGCCACAAGTT |
| | GACGAAACTGAGTGAATATGGAATGAACGTCACAGC |
| | TACGGTGTACGCCGAAGCTTTTGGGGTTATTTACGAA |
| | AACATGGATGAACTGATGGCCGCTTACAATAAAGTG |
| | CCTAACTCAATCTCCTTCGAGAACGCGCTGAAGATGC |
| | GTCTTAATGCCGTTACAAGCACCAATACAGAAGGGG |
| | CTGTTATCCACATTAATCGCAGTTGTAAGCTGTGGTC |
| | AGGATTCTTATACGAACTGGCCCGTCGTTTGGAAAAG |
| | GAGACGGGGATCCCTGTTGTTTCGTTCGACGGAGATC |
| | AAGCGGATCCCCGTAACTTCTCCGAGGCTCAATATGA |
| | CACTCGCATCCAAGGTTTAAATGAGGTGATGGTCGCG |
| | AAAAAAGAAGCAGAGTGA |
| fldC | ATGTCGAATAGTGACAAGTTTTTTAACGACTTCAAGG |
| SEQ ID NO: 278 | ACATTGTGGAAAACCCAAAGAAGTATATCATGAAGC |
| | ATATGGAACAAACGGGACAAAAAGCCATCGGTTGCA |
| | TGCCTTTATACACCCCAGAAGAGCTTGTCTTAGCGGC |
| | GGGTATGTTTCCTGTTGGAGTATGGGGCTCGAATACT |
| | GAGTTGTCAAAAGCCAAGACCTACTTTCCGGCTTTTA |
| | TCTGTTCTATCTTGCAAACTACTTTAGAAAACGCATT |
| | GAATGGGGAGTATGACATGCTGTCTGGTATGATGATC |
| | ACAAACTATTGCGATTCGCTGAAATGTATGGGACAA |
| | AACTTCAAACTTACAGTGGAAAATATCGAATTCATCC |
| | CGGTTACGGTTCCACAAAACCGCAAGATGGAGGCGG |
| | GTAAAGAATTTCTGAAATCCCAGTATAAAATGAATAT |
| | CGAACAACTGGAAAAAATCTCAGGGAATAAGATCAC |
| | TGACGAGAGCTTGGAGAAGGCTATTGAAATTTACGA |
| | TGAGCACCGTAAAGTCATGAACGATTTCTCTATGCTT |
| | GCGTCCAAGTACCCTGGTATCATTACGCCAACGAAAC |
| | GTAACTACGTGATGAAGTCAGCGTATTATATGGACAA |
| | GAAAGAACATACAGAGAAGGTACGTCAGTTGATGGA |
| | TGAAATCAAGGCCATTGAGCCTAAACCATTCGAAGG |
| | AAAACGCGTGATTACCACTGGGATCATTGCAGATTCG |
| | GAGGACCTTTTGAAAATCTTGGAGGAGAATAACATT |
| | GCTATCGTGGGAGATGATATTGCACACGAGTCTCGCC |
| | AATACCGCACTTTGACCCCGGAGGCCAACACACCTAT |
| | GGACCGTCTTGCTGAACAATTTGCGAACCGCGAGTGT |
| | TCGACGTTGTATGACCCTGAAAAAAAACGTGGACAG |
| | TATATTGTCGAGATGGCAAAAGAGCGTAAGGCCGAC |
| | GGAATCATCTTCTTCATGACAAAATTCTGCGATCCCG |
| | AAGAATACGATTACCCTCAGATGAAAAAAGACTTCG |
| | AAGAAGCCGGTATTCCCCACGTTCTGATTGAGACAGA |
| | CATGCAAATGAAGAACTACGAACAAGCTCGCACCGC |
| | TATTCAAGCATTTTCAGAAACCCTTTG |
| Acul | ATGCGTGCTGTCTTAATCGAGAAGTCAGATGACACCC |
| SEQ ID NO: 279 | AGAGTGTTTCAGTTACGGAGTTGGCTGAAGACCAATT |
| | ACCCGAAGGTGACGTCCTTGTGGATGTCGCGTACAGC |
| | ACATTGAATTACAAGGATGCTCTTGCGATTACTGGAA |
| | AAGCACCCGTTGTACGCCGTTTTCCTATGGTCCCCGG |
| | AATTGACTTTACTGGGACTGTCGCACAGAGTTCCCAT |
| | GCTGATTTCAAGCCAGGCGACCGCGTAATTCTGAACG |
| | GATGGGGAGTTGGTGAGAAACACTGGGGCGGTCTTG |
| | CAGAACGCGCACGCGTACGTGGGGACTGGCTTGTCC |
| | CGTTGCCAGCCCCCTTAGACTTGCGCCAGGCTGCAAT |
| | GATTGGCACTGCGGGGTACACAGCTATGCTGTGCGTG |
| | CTTGCCCTTGAGCGCCATGGAGTCGTACCTGGGAACG |
| | GCGAGATTGTCGTCTCAGGCGCAGCAGGAGGGGTAG |
| | GTTCTGTAGCAACCACACTGTTAGCAGCCAAAGGCTA |
| | CGAAGTGGCCGCCGTGACCGGGCGCGCAAGCGAGGC |
| | CGAATATTTACGCGGATTAGGCGCCGCGTCGGTCATT |
| | GATCGCAATGAATTAACGGGGAAGGTGCGTCCATTA |
| | GGGCAGGAACGCTGGGCAGGAGGAATCGATGTAGCA |
| | GGATCAACCGTACTTGCTAATATGTTGAGCATGATGA |
| | AATACCGTGGCGTGGTGGCGGCCTGTGGCCTGGCGG |
| | CTGGAATGGACTTGCCCGCGTCTGTCGCCCCTTTTATT |
| | CTGCGTGGTATGACTTTGGCAGGGGTAGATTCAGTCA |
| | TGTGCCCCAAAACTGATCGTCTGGCTGCTTGGGCACG |
| | CCTGGCATCCGACCTGGACCCTGCAAAGCTGGAAGA |
| | GATGACAACTGAATTACCGTTCTCTGAGGTGATTGAA |
| | ACGGCTCCGAAGTTCTTGGATGGAACAGTGCGTGGG |
| | CGTATTGTCATTCCGGTAACACCTTGA |
| fldH1 | ATGAAAATCTTGGCATACTGCGTCCGCCCAGACGAG |
| SEQ ID NO: 280 | GTAGACTCCTTTAAGAAATTTAGTGAAAAGTACGGGC |
| | ATACAGTTGATCTTATTCCAGACTCTTTTGGACCTAAT |
| | GTCGCTCATTTGGCGAAGGGTTACGATGGGATTTCTA |
| | TTCTGGGCAACGACACGTGTAACCGTGAGGCACTGG |
| | AGAAGATCAAGGATTGCGGGATCAAATATCTGGCAA |
| | CCCGTACAGCCGGAGTGAACAACATTGACTTCGATGC |
| | AGCAAAGGAGTTCGGTATTAACGTGGCTAATGTTCCC |
| | GCATATTCCCCCAACTCGGTCAGCGAATTTACCATTG |
| | GATTGGCATTAAGTCTGACGCGTAAGATTCCATTTGC |
| | CCTGAAACGCGTGGAACTGAACAATTTTGCGCTTGGC |
| | GGCCTTATTGGTGTGGAATTGCGTAACTTAACTTTAG |
| | GAGTCATCGGTACTGGTCGCATCGGATTGAAAGTGAT |
| | TGAGGGCTTCTCTGGGTTTGGAATGAAAAAAATGATC |
| | GGTTATGACATTTTTGAAAATGAAGAAGCAAAGAAG |
| | TACATCGAATACAAATCATTAGACGAAGTTTTTAAAG |
| | AGGCTGATATTATCACTCTGCATGCGCCTCTGACAGA |
| | CGACAACTATCATATGATTGGTAAAGAATCCATTGCT |
| | AAAATGAAGGATGGGGTATTTATTATCAACGCAGCG |
| | CGTGGAGCCTTAATCGATAGTGAGGCCCTGATTGAAG |
| | GGTTAAAATCGGGGAAGATTGCGGGCGCGGCTCTGG |
| | ATAGCTATGAGTATGAGCAAGGTGTCTTTCACAACAA |
| | TAAGATGAATGAAATTATGCAGGATGATACCTTGGA |
| | ACGTCTGAAATCTTTTCCCAACGTCGTGATCACGCCG |
| | CATTTGGGTTTTTATACTGATGAGGCGGTTTCCAATA |
| | TGGTAGAGATCACACTGATGAACCTTCAGGAATTCGA |
| | GTTGAAAGGAACCTGTAAGAACCAGCGTGTTTGTAA |
| | ATGA |
| fbrAroG-TrpDH- | Ctctagaaataattttgtttaactttaagaaggagatatacat |
| fldABCDH (RBS | atgaattatcagaacgacgatttacgcatcaaagaaatcaaagagttacttcctcctgtcg |
| | cattgctggaaaaattccccgctactgaaaatgccgcgaatacggtcgcccatgcccga |
| and leader region | aaagcgatccataagatcctgaaaggtaatgatgatcgcctgttggtggtgattggccca |
| underlined) | tgctcaattcatgatcctgtcgcggctaaagagtatgccactcgcttgctgacgctgcgtg |
| SEQ ID NO: 281 | aagagctgcaagatgagctggaaatcgtgatgcgcgtctattttgaaaagccgcgtacta |
| | cggtgggctggaaagggctgattaacgatccgcatatggataacagcttccagatcaac |
| | gacggtctgcgtattgcccgcaaattgctgctcgatattaacgacagcggtctgccagcg |
| | gcgggtgaattcctggatatgatcaccctacaatatctcgctgacctgatgagctggggc |
| | gcaattggcgcacgtaccaccgaatcgcaggtgcaccgcgaactggcgtctggtctttc |
| | ttgtccggtaggtttcaaaaatggcactgatggtacgattaaagtggctatcgatgccatta |
| | atgccgccggtgcgccgcactgcttcctgtccgtaacgaaatgggggcattcggcgatt |
| | gtgaataccagcggtaacggcgattgccatatcattctgcgcggcggtaaagagcctaa |
| | ctacagcgcgaagcacgttgctgaagtgaaagaagggctgaacaaagcaggcctgcc |
| | agcgcaggtgatgatcgatttcagccatgctaactcgtcaaaacaattcaaaaagcagat |
| | ggatgtttgtactgacgtttgccagcagattgccggtggcgaaaaggccattattggcgt |
| | gatggtggaaagccatctggtggaaggcaatcagagcctcgagagcggggaaccgct |
| | ggcctacggtaagagcatcaccgatgcctgcattggctgggatgataccgatgctctgtt |
| | acgtcaactggcgagtgcagtaaaagcgcgtcgcgggtaaTACTtaagaaggaga |
| | tatacatATGCTGTTATTCGAGACTGTGCGTGAAATGGGT |
| | CATGAGCAAGTCCTTTTCTGTCATAGCAAGAATCCCG |
| | AGATCAAGGCAATTATCGCAATCCACGATACCACCTT |
| | AGGACCGGCTATGGGCGCAACTCGTATCTTACCTTAT |
| | ATTAATGAGGAGGCTGCCCTGAAAGATGCATTACGTC |
| | TGTCCCGCGGAATGACTTACAAAGCAGCCTGCGCCA |
| | ATATTCCCGCCGGGGGCGGCAAAGCCGTCATCATCGC |
| | TAACCCCGAAAACAAGACCGATGACCTGTTACGCGC |
| | ATACGGCCGTTTCGTGGACAGCTTGAACGGCCGTTTC |
| | ATCACCGGGCAGGACGTTAACATTACGCCCGACGAC |
| | GTTCGCACTATTTCGCAGGAGACTAAGTACGTGGTAG |
| | GCGTCTCAGAAAAGTCGGGAGGGCCGGCACCTATCA |
| | CCTCTCTGGGAGTATTTTTAGGCATCAAAGCCGCTGT |
| | AGAGTCGCGTTGGCAGTCTAAACGCCTGGATGGCAT |
| | GAAAGTGGCGGTGCAAGGACTTGGGAACGTAGGAAA |
| | AAATCTTTGTCGCCATCTGCATGAACACGATGTACAA |
| | CTTTTTGTGTCTGATGTCGATCCAATCAAGGCCGAGG |
| | AAGTAAAACGCTTATTCGGGGCGACTGTTGTCGAACC |
| | GACTGAAATCTATTCTTTAGATGTTGATATTTTTGCAC |
| | CGTGTGCACTTGGGGGTATTTTGAATAGCCATACCAT |
| | CCCGTTCTTACAAGCCTCAATCATCGCAGGAGCAGCG |
| | AATAACCAGCTGGAGAACGAGCAACTTCATTCGCAG |
| | ATGCTTGCGAAAAAGGGTATTCTTTACTCACCAGACT |
| | ACGTTATCAATGCAGGAGGACTTATCAATGTTTATAA |
| | CGAAATGATCGGATATGACGAGGAAAAAGCATTCAA |
| | ACAAGTTCATAACATCTACGATACGTTATTAGCGATT |
| | TTCGAAATTGCAAAAGAACAAGGTGTAACCACCAAC |
| | GACGCGGCCCGTCGTTTAGCAGAGGATCGTATCAAC |
| | AACTCCAAACGCTCAAAGAGTAAAGCGATTGCGGCG |
| | TGAAATGtaagaaggagatatacatATGGAAAACAACACCAAT |
| | ATGTTCTCTGGAGTGAAGGTGATCGAACTGGCCAACT |
| | TTATCGCTGCTCCGGCGGCAGGTCGCTTCTTTGCTGA |
| | TGGGGGAGCAGAAGTAATTAAGATCGAATCTCCAGC |
| | AGGCGACCCGCTGCGCTACACGGCCCCATCAGAAGG |
| | ACGCCCGCTTTCTCAAGAGGAAAACACAACGTATGA |
| | TTTGGAAAACGCGAATAAGAAAGCAATTGTTCTGAA |
| | CTTAAAATCGGAAAAAGGAAAGAAAATTCTTCACGA |
| | GATGCTTGCTGAGGCAGACATCTTGTTAACAAATTGG |
| | CGCACGAAAGCGTTAGTCAAACAGGGGTTAGATTAC |
| | GAAACACTGAAAGAGAAGTATCCAAAATTGGTATTT |
| | GCACAGATTACAGGATACGGGGAGAAAGGACCCGAC |
| | AAAGACCTGCCTGGTTTCGACTACACGGCGTTTTTCG |
| | CCCGCGGAGGAGTCTCCGGTACATTATATGAAAAAG |
| | GAACTGTCCCTCCTAATGTGGTACCGGGTCTGGGTGA |
| | CCACCAGGCAGGAATGTTCTTAGCTGCCGGTATGGCT |
| | GGTGCGTTGTATAAGGCCAAAACCACCGGACAAGGC |
| | GACAAAGTCACCGTTAGTCTGATGCATAGCGCAATGT |
| | ACGGCCTGGGAATCATGATTCAGGCAGCCCAGTACA |
| | AGGACCATGGGCTGGTGTACCCGATCAACCGTAATG |
| | AAACGCCTAATCCTTTCATCGTTTCATACAAGTCCAA |
| | AGATGATTACTTTGTCCAAGTTTGCATGCCTCCCTAT |
| | GATGTGTTTTATGATCGCTTTATGACGGCCTTAGGAC |
| | GTGAAGACTTGGTAGGTGACGAACGCTACAATAAGA |
| | TCGAGAACTTGAAGGATGGTCGCGCAAAAGAAGTCT |
| | ATTCCATCATCGAACAACAAATGGTAACGAAGACGA |
| | AGGACGAATGGGACAAGATTTTTCGTGATGCAGACA |
| | TTCCATTCGCTATTGCCCAAACGTGGGAAGATCTTTT |
| | AGAAGACGAGCAGGCATGGGCCAACGACTACCTGTA |
| | TAAAATGAAGTATCCCACAGGCAACGAACGTGCCCT |
| | GGTACGTTTACCTGTGTTCTTCAAAGAAGCTGGACTT |
| | CCTGAATACAACCAGTCGCCACAGATTGCTGAGAAT |
| | ACCGTGGAAGTGTTAAAGGAGATGGGATATACCGAG |
| | CAAGAAATTGAGGAGCTTGAGAAAGACAAAGACATC |
| | ATGGTACGTAAAGAGAAATGAAGGTtaagaaggagatatacat |
| | ATGTCAGACCGCAACAAAGAAGTGAAAGAAAAGAA |
| | GGCTAAACACTATCTGCGCGAGATCACAGCTAAACA |
| | CTACAAGGAAGCGTTAGAGGCTAAAGAGCGTGGGGA |
| | GAAAGTGGGTTGGTGTGCCTCTAACTTCCCCCAAGAG |
| | ATTGCAACCACGTTGGGTGTAAAGGTTGTTTATCCCG |
| | AAAACCACGCCGCCGCCGTAGCGGCACGTGGCAATG |
| | GGCAAAATATGTGCGAACACGCGGAGGCTATGGGAT |
| | TCAGTAATGATGTGTGTGGATATGCACGTGTAAATTT |
| | AGCCGTAATGGACATCGGCCATAGTGAAGATCAACC |
| | TATTCCAATGCCTGATTTCGTTCTGTGCTGTAATAATA |
| | TCTGCAATCAGATGATTAAATGGTATGAACACATTGC |
| | AAAAACGTTGGATATTCCTATGATCCTTATCGATATT |
| | CCATATAATACTGAGAACACGGTGTCTCAGGACCGC |
| | ATTAAGTACATCCGCGCCCAGTTCGATGACGCTATCA |
| | AGCAACTGGAAGAAATCACTGGCAAAAAGTGGGACG |
| | AGAATAAATTCGAAGAAGTGATGAAGATTTCGCAAG |
| | AATCGGCCAAGCAATGGTTACGCGCCGCGAGCTACG |
| | CGAAATACAAACCATCACCGTTTTCGGGCTTTGACCT |
| | TTTTAATCACATGGCTGTAGCCGTTTGTGCTCGCGGC |
| | ACCCAGGAAGCCGCCGATGCATTCAAAATGTTAGCA |
| | GATGAATATGAAGAGAACGTTAAGACAGGAAAGTCT |
| | ACTTATCGCGGCGAGGAGAAGCAGCGTATCTTGTTCG |
| | AGGGCATCGCTTGTTGGCCTTATCTGCGCCACAAGTT |
| | GACGAAACTGAGTGAATATGGAATGAACGTCACAGC |
| | TACGGTGTACGCCGAAGCTTTTGGGGTTATTTACGAA |
| | AACATGGATGAACTGATGGCCGCTTACAATAAAGTG |
| | CCTAACTCAATCTCCTTCGAGAACGCGCTGAAGATGC |
| | GTCTTAATGCCGTTACAAGCACCAATACAGAAGGGG |
| | CTGTTATCCACATTAATCGCAGTTGTAAGCTGTGGTC |
| | AGGATTCTTATACGAACTGGCCCGTCGTTTGGAAAAG |
| | GAGACGGGGATCCCTGTTGTTTCGTTCGACGGAGATC |
| | AAGCGGATCCCCGTAACTTCTCCGAGGCTCAATATGA |
| | CACTCGCATCCAAGGTTTAAATGAGGTGATGGTCGCG |
| | AAAAAAGAAGCAGAGTGAGCTTtaagaaggagatatacatATG |
| | TCGAATAGTGACAAGTTTTTTAACGACTTCAAGGACA |
| | TTGTGGAAAACCCAAAGAAGTATATCATGAAGCATA |
| | TGGAACAAACGGGACAAAAAGCCATCGGTTGCATGC |
| | CTTTATACACCCCAGAAGAGCTTGTCTTAGCGGCGGG |
| | TATGTTTCCTGTTGGAGTATGGGGCTCGAATACTGAG |
| | TTGTCAAAAGCCAAGACCTACTTTCCGGCTTTTATCT |
| | GTTCTATCTTGCAAACTACTTTAGAAAACGCATTGAA |
| | TGGGGAGTATGACATGCTGTCTGGTATGATGATCACA |
| | AACTATTGCGATTCGCTGAAATGTATGGGACAAAACT |
| | TCAAACTTACAGTGGAAAATATCGAATTCATCCCGGT |
| | TACGGTTCCACAAAACCGCAAGATGGAGGCGGGTAA |
| | AGAATTTCTGAAATCCCAGTATAAAATGAATATCGAA |
| | CAACTGGAAAAAATCTCAGGGAATAAGATCACTGAC |
| | GAGAGCTTGGAGAAGGCTATTGAAATTTACGATGAG |
| | CACCGTAAAGTCATGAACGATTTCTCTATGCTTGCGT |
| | CCAAGTACCCTGGTATCATTACGCCAACGAAACGTAA |
| | CTACGTGATGAAGTCAGCGTATTATATGGACAAGAA |
| | AGAACATACAGAGAAGGTACGTCAGTTGATGGATGA |
| | AATCAAGGCCATTGAGCCTAAACCATTCGAAGGAAA |
| | ACGCGTGATTACCACTGGGATCATTGCAGATTCGGAG |
| | GACCTTTTGAAAATCTTGGAGGAGAATAACATTGCTA |
| | TCGTGGGAGATGATATTGCACACGAGTCTCGCCAATA |
| | CCGCACTTTGACCCCGGAGGCCAACACACCTATGGAC |
| | CGTCTTGCTGAACAATTTGCGAACCGCGAGTGTTCGA |
| | CGTTGTATGACCCTGAAAAAAAACGTGGACAGTATA |
| | TTGTCGAGATGGCAAAAGAGCGTAAGGCCGACGGAA |
| | TCATCTTCTTCATGACAAAATTCTGCGATCCCGAAGA |
| | ATACGATTACCCTCAGATGAAAAAAGACTTCGAAGA |
| | AGCCGGTATTCCCCACGTTCTGATTGAGACAGACATG |
| | CAAATGAAGAACTACGAACAAGCTCGCACCGCTATT |
| | CAAGCATTTTCAGAAACCCTTTGACGCTtaagaaggagatata |
| | catATGTTCTTTACGGAGCAACACGAACTTATTCGCAA |
| | ACTGGCGCGTGACTTTGCCGAACAGGAAATCGAGCC |
| | TATCGCAGACGAAGTAGATAAAACCGCAGAGTTCCC |
| | AAAAGAAATCGTGAAGAAGATGGCTCAAAATGGATT |
| | TTTCGGCATTAAAATGCCTAAAGAATACGGAGGGGC |
| | GGGTGCGGATAACCGCGCTTATGTCACTATTATGGAG |
| | GAAATTTCACGTGCTTCCGGGGTAGCGGGTATCTACC |
| | TGAGCTCGCCGAACAGTTTGTTAGGAACTCCCTTCTT |
| | ATTGGTCGGAACCGATGAGCAAAAAGAAAAGTACCT |
| | TAAGCCTATGATCCGCGGCGAGAAGACTCTGGCGTTC |
| | GCCCTGACAGAGCCTGGTGCTGGCTCTGATGCGGGTG |
| | CGTTGGCTACTACTGCCCGTGAAGAGGGCGACTATTA |
| | TATCTTAAATGGCCGCAAGACGTTTATTACAGGGGCT |
| | CCTATTAGCGACAATATTATTGTGTTCGCAAAAACCG |
| | ATATGAGCAAAGGGACCAAAGGTATCACCACTTTCA |
| | TTGTGGACTCAAAGCAGGAAGGGGTAAGTTTTGGTA |
| | AGCCAGAGGACAAAATGGGAATGATTGGTTGTCCGA |
| | CAAGCGACATCATCTTGGAAAACGTTAAAGTTCATAA |
| | GTCCGACATCTTGGGAGAAGTCAATAAGGGGTTTATT |
| | ACCGCGATGAAAACACTTTCCGTTGGTCGTATCGGAG |
| | TGGCGTCACAGGCGCTTGGAATTGCACAGGCCGCCGT |
| | AGATGAGGCGGTAAAGTACGCCAAGCAACGTAAACA |
| | ATTCAATCGCCCAATCGCGAAATTTCAGGCCATTCAA |
| | TTTAAACTTGCCAATATGGAGACTAAATTAAATGCCG |
| | CTAAACTTCTTGTTTATAACGCAGCGTACAAAATGGA |
| | TTGTGGAGAAAAAGCCGACAAGGAAGCCTCTATGGC |
| | TAAATACTTTGCTGCTGAATCAGCGATCCAAATCGTT |
| | AACGACGCGCTGCAAATCCATGGCGGGTATGGCTAT |
| | ATCAAAGACTACAAGATTGAACGTTTGTACCGCGATG |
| | TGCGTGTGATCGCTATTTATGAGGGCACTTCCGAGGT |
| | CCAACAGATGGTTATCGCGTCCAATCTGCTGAAGTAA |
| | TACTtaagaaggagatatacatATGAAAATCTTGGCATACTGCG |
| | TCCGCCCAGACGAGGTAGACTCCTTTAAGAAATTTAG |
| | TGAAAAGTACGGGCATACAGTTGATCTTATTCCAGAC |
| | TCTTTTGGACCTAATGTCGCTCATTTGGCGAAGGGTT |
| | ACGATGGGATTTCTATTCTGGGCAACGACACGTGTAA |
| | CCGTGAGGCACTGGAGAAGATCAAGGATTGCGGGAT |
| | CAAATATCTGGCAACCCGTACAGCCGGAGTGAACAA |
| | CATTGACTTCGATGCAGCAAAGGAGTTCGGTATTAAC |
| | GTGGCTAATGTTCCCGCATATTCCCCCAACTCGGTCA |
| | GCGAATTTACCATTGGATTGGCATTAAGTCTGACGCG |
| | TAAGATTCCATTTGCCCTGAAACGCGTGGAACTGAAC |
| | AATTTTGCGCTTGGCGGCCTTATTGGTGTGGAATTGC |
| | GTAACTTAACTTTAGGAGTCATCGGTACTGGTCGCAT |
| | CGGATTGAAAGTGATTGAGGGCTTCTCTGGGTTTGGA |
| | ATGAAAAAAATGATCGGTTATGACATTTTTGAAAATG |
| | AAGAAGCAAAGAAGTACATCGAATACAAATCATTAG |
| | ACGAAGTTTTTAAAGAGGCTGATATTATCACTCTGCA |
| | TGCGCCTCTGACAGACGACAACTATCATATGATTGGT |
| | AAAGAATCCATTGCTAAAATGAAGGATGGGGTATTT |
| | ATTATCAACGCAGCGCGTGGAGCCTTAATCGATAGTG |
| | AGGCCCTGATTGAAGGGTTAAAATCGGGGAAGATTG |
| | CGGGCGCGGCTCTGGATAGCTATGAGTATGAGCAAG |
| | GTGTCTTTCACAACAATAAGATGAATGAAATTATGCA |
| | GGATGATACCTTGGAACGTCTGAAATCTTTTCCCAAC |
| | GTCGTGATCACGCCGCATTTGGGTTTTTATACTGATG |
| | AGGCGGTTTCCAATATGGTAGAGATCACACTGATGA |
| | ACCTTCAGGAATTCGAGTTGAAAGGAACCTGTAAGA |
| | ACCAGCGTGTTTGTAAATGA |
| FldD | ATGTTCTTTACGGAGCAACACGAACTTATTCGCAAAC |
| SEQ ID NO: 282 | TGGCGCGTGACTTTGCCGAACAGGAAATCGAGCCTAT |
| | CGCAGACGAAGTAGATAAAACCGCAGAGTTCCCAAA |
| | AGAAATCGTGAAGAAGATGGCTCAAAATGGATTTTT |
| | CGGCATTAAAATGCCTAAAGAATACGGAGGGGCGGG |
| | TGCGGATAACCGCGCTTATGTCACTATTATGGAGGAA |
| | ATTTCACGTGCTTCCGGGGTAGCGGGTATCTACCTGA |
| | GCTCGCCGAACAGTTTGTTAGGAACTCCCTTCTTATT |
| | GGTCGGAACCGATGAGCAAAAAGAAAAGTACCTTAA |
| | GCCTATGATCCGCGGCGAGAAGACTCTGGCGTTCGCC |
| | CTGACAGAGCCTGGTGCTGGCTCTGATGCGGGTGCGT |
| | TGGCTACTACTGCCCGTGAAGAGGGCGACTATTATAT |
| | CTTAAATGGCCGCAAGACGTTTATTACAGGGGCTCCT |
| | ATTAGCGACAATATTATTGTGTTCGCAAAAACCGATA |
| | TGAGCAAAGGGACCAAAGGTATCACCACTTTCATTGT |
| | GGACTCAAAGCAGGAAGGGGTAAGTTTTGGTAAGCC |
| | AGAGGACAAAATGGGAATGATTGGTTGTCCGACAAG |
| | CGACATCATCTTGGAAAACGTTAAAGTTCATAAGTCC |
| | GACATCTTGGGAGAAGTCAATAAGGGGTTTATTACCG |
| | CGATGAAAACACTTTCCGTTGGTCGTATCGGAGTGGC |
| | GTCACAGGCGCTTGGAATTGCACAGGCCGCCGTAGA |
| | TGAGGCGGTAAAGTACGCCAAGCAACGTAAACAATT |
| | CAATCGCCCAATCGCGAAATTTCAGGCCATTCAATTT |
| | AAACTTGCCAATATGGAGACTAAATTAAATGCCGCTA |
| | AACTTCTTGTTTATAACGCAGCGTACAAAATGGATTG |
| | TGGAGAAAAAGCCGACAAGGAAGCCTCTATGGCTAA |
| | ATACTTTGCTGCTGAATCAGCGATCCAAATCGTTAAC |
| | GACGCGCTGCAAATCCATGGCGGGTATGGCTATATCA |
| | AAGACTACAAGATTGAACGTTTGTACCGCGATGTGCG |
| | TGTGATCGCTATTTATGAGGGCACTTCCGAGGTCCAA |
| | CAGATGGTTATCGCGTCCAATCTGCTGAAGTAA |
| RBS | taagaaggagatatacat |
| SEQ ID NO: 283 | |
| RBS | ctctagaaataattttgtttaactttaagaaggagatatacat |
| SEQ ID NO: 284 | |

[1515] In one embodiment, the genetically engineered bacteria comprise a sequence which has at least about 80% identity with one or more sequences of Table 81. In another embodiment, the genetically engineered bacteria comprise a sequence which has at least about 85% identity with one or more sequences of Table 81. In one embodiment, the genetically engineered bacteria comprise a sequence which has at least about 90% identity with one or more sequences of Table 81. In one embodiment, the genetically engineered bacteria comprise a sequence which has at least about 95% identity with one or more sequences of Table 81. In another embodiment, the bcd2 gene has at least about 96%, 97%, 98%, or 99% identity with one or more sequences of Table 81. Accordingly, in one embodiment, the genetically engineered bacteria comprise a sequence which has at least about 80%, 81%, 82%, 83%, 84%, 85%, 86%, 87%, 88%, 89%, 90%, 91%, 92%, 93%, 94%, 95%, 96%, 97%, 98%, or 99% identity with one or more sequences of Table 81. In another embodiment, the genetically engineered bacteria comprise the sequence of SEQ ID NO: 263. In yet another embodiment the genetically engineered bacteria comprise a sequence which consists of the sequence of with one or more sequences of Table 81.

[1516] In one embodiment, the genetically engineered bacteria comprise a sequence which has at least about 80% identity with SEQ ID NO: 263. In another embodiment, the genetically engineered bacteria comprise a sequence which has at least about 85% identity with SEQ ID NO: 263. In one embodiment, the genetically engineered bacteria comprise a sequence which has at least about 90% identity with SEQ ID NO: 263. In one embodiment, the genetically engineered bacteria comprise a sequence which has at least about 95% identity with SEQ ID NO: 263. In another embodiment, the bcd2 gene has at least about 96%, 97%, 98%, or 99% identity with SEQ ID NO: 263. Accordingly, in one embodiment, the genetically engineered bacteria comprise a sequence which has at least about 80%, 81%, 82%, 83%, 84%, 85%, 86%, 87%, 88%, 89%, 90%, 91%, 92%, 93%, 94%, 95%, 96%, 97%, 98%, or 99% identity with SEQ ID NO: 263. In another embodiment, the genetically engineered bacteria comprise the sequence of SEQ ID NO: 263. In yet another embodiment the genetically engineered bacteria comprise a sequence which consists of the sequence of SEQ ID NO: 263.

[1517] In one embodiment, the genetically engineered bacteria comprise a sequence which has at least about 80% identity with SEQ ID NO: 261. In another embodiment, the genetically engineered bacteria comprise a sequence which has at least about 85% identity with SEQ ID NO: 261. In one embodiment, the genetically engineered bacteria comprise a sequence which has at least about 90% identity with SEQ ID NO: 261. In one embodiment, the genetically engineered bacteria comprise a sequence which has at least about 95% identity with SEQ ID NO: 261. In another embodiment, the bcd2 gene has at least about 96%, 97%, 98%, or 99% identity with SEQ ID NO: 261. Accordingly, in one embodiment, the genetically engineered bacteria comprise a sequence which has at least about 80%, 81%, 82%, 83%, 84%, 85%, 86%, 87%, 88%, 89%, 90%, 91%, 92%, 93%, 94%, 95%, 96%, 97%, 98%, or 99% identity with SEQ ID NO: 261. In another embodiment, the genetically engineered bacteria comprise the sequence of SEQ ID NO: 261. In yet another embodiment the genetically engineered bacteria comprise a sequence which consists of the sequence of SEQ ID NO: 261.

[1518] In one embodiment, the genetically engineered bacteria comprise a sequence which has at least about 80% identity with SEQ ID NO: 273. In another embodiment, the genetically engineered bacteria comprise a sequence which has at least about 85% identity with SEQ ID NO: 273. In one embodiment, the genetically engineered bacteria comprise a sequence which has at least about 90% identity with SEQ ID NO: 273. In one embodiment, the genetically engineered bacteria comprise a sequence which has at least about 95% identity with SEQ ID NO: 273. In another embodiment, the bcd2 gene has at least about 96%, 97%, 98%, or 99% identity with SEQ ID NO: 273. Accordingly, in one embodiment, the genetically engineered bacteria comprise a sequence which has at least about 80%, 81%, 82%, 83%, 84%, 85%, 86%, 87%, 88%, 89%, 90%, 91%, 92%, 93%, 94%, 95%, 96%, 97%, 98%, or 99% identity with SEQ ID NO: 273. In another embodiment, the genetically engineered bacteria comprise the sequence of SEQ ID NO: 273. In yet another embodiment the genetically engineered bacteria comprise a sequence which consists of the sequence of SEQ ID NO: 273.

[1519] In one embodiment, the genetically engineered bacteria comprise a sequence which has at least about 80% identity with SEQ ID NO: 256. In another embodiment, the genetically engineered bacteria comprise a sequence which has at least about 85% identity with SEQ ID NO: 256. In one embodiment, the genetically engineered bacteria comprise a sequence which has at least about 90% identity with SEQ ID NO: 256. In one embodiment, the genetically engineered bacteria comprise a sequence which has at least about 95% identity with SEQ ID NO: 256. In another embodiment, the bcd2 gene has at least about 96%, 97%, 98%, or 99% identity with SEQ ID NO: 256. Accordingly, in one embodiment, the genetically engineered bacteria comprise a sequence which has at least about 80%, 81%, 82%, 83%, 84%, 85%, 86%, 87%, 88%, 89%, 90%, 91%, 92%, 93%, 94%, 95%, 96%, 97%, 98%, or 99% identity with SEQ ID NO: 256. In another embodiment, the genetically engineered bacteria comprise the sequence of SEQ ID NO: 256. In yet another embodiment the genetically engineered bacteria comprise a sequence which consists of the sequence of SEQ ID NO: 256.

[1520] In one embodiment, the genetically engineered bacteria comprise a sequence which has at least about 80% identity with SEQ ID NO: 257. In another embodiment, the genetically engineered bacteria comprise a sequence which has at least about 85% identity with SEQ ID NO: 257. In one embodiment, the genetically engineered bacteria comprise a sequence which has at least about 90% identity with SEQ ID NO: 257. In one embodiment, the genetically engineered bacteria comprise a sequence which has at least about 95% identity with SEQ ID NO: 257. In another embodiment, the bcd2 gene has at least about 96%, 97%, 98%, or 99% identity with SEQ ID NO: 257. Accordingly, in one embodiment, the genetically engineered bacteria comprise a sequence which has at least about 80%, 81%, 82%, 83%, 84%, 85%, 86%, 87%, 88%, 89%, 90%, 91%, 92%, 93%, 94%, 95%, 96%, 97%, 98%, or 99% identity with SEQ ID NO: 257. In another embodiment, the genetically engineered bacteria comprise the sequence of SEQ ID NO: 257. In yet another embodiment the genetically engineered bacteria comprise a sequence which consists of the sequence of SEQ ID NO: 257.

### Example 52. Tryptophan Production in an Engineered Strain of E. coli Nissle

[1521] A number of tryptophan metabolites, either host-derived (such as tryptamine or kynurenine) or intestinal bacteria-derived (such as indole acetate or indole), have been shown to downregulate inflammation and promote gut barrier health, via the activation of the AhR receptor. Other tryptophan metabolites, such as the bacteria-derived indole propionate, have been shown to help restore intestinal barrier integrity, in experimental models of colitis. In this example, the E. coli strain Nissle was engineered to produce tryptophan, the precursor to all those beneficial metabolites.

[1522] First, in order to remove the negative regulation of tryptophan biosynthetic genes mediated by the transcription factor TrpR, the trpR gene was deleted form the E. coli Nissle genome. The tryptophan operon trpEDCBA was amplified by PCR from the E. coli Nissle genomic DNA and cloned in the low-copy plasmid pSC101 under the control of the tet promoter, downstream of the tetR repressor gene. This tet-trpEDCBA plasmid was then transformed into the ΔtrpR mutant to obtain the ΔtrpR, tet-trpEDCBA strain. Subsequently, a feedback resistant version of the aroG gene (aroG^{fbr}) from E. coli Nissle, coding for the enzyme catalyzing the first committing step towards aromatic amino acid production, was synthetized and cloned into the medium copy plasmid p15A, under the control of the tet promoter, downstream of the tetR repressor. This plasmid was transformed into the ΔtrpR, tet-trpEDCBA strain to obtain the ΔtrpR, tet-trpEDCBA, tet-aroG^{fbr} strain. Finally, a feedback resistant version of the tet-trpEBCDA construct (tet-trpE^{fbr} BCDA) was generated from the tet-trpEBCDA. Both the tet-aroG^{fbr} and the tet-trpE^{fbr} BCDA constructs were transformed into the ΔtrpR mutant to obtain the ΔtrpR, tet-trpE^{fbr} DCBA, tet-aroG^{fbr} strain.

[1523] All generated strains were grown in LB overnight with the appropriate antibiotics and subcultured 1/100 in 3 mL LB with antibiotics in culture tubes. After two hours of growth at 37 C at 250 rpm, 100 ng/mL anhydrotetracycline (ATC) was added to the culture to induce expression of the constructs. Two hours after induction, the bacterial cells were pelleted by centrifugation at 4,000 rpm for 5 min and resuspended in 3 mL M9 minimal media. Cells were spun down again at 4,000 rpm for 5 min, resuspended in 3 mL M9 minimal media with 0.5% glucose and placed at 37 C at 250 rpm. 200 uL were collected at 2 h, 4 h and 16 h and tryptophan was quantified by LC-MS/MS in the bacterial supernatant. FIG. 45A shows that tryptophan is being produced and secreted by the ΔtrpR, tet-trpEDCBA, tet-aroG^{fbr} strain. The production of tryptophan is significantly enhanced by expressing the feedback resistant version of trpE.

### Example 53. Improved Tryptophan by Using a Non-PTS Carbon Source and by Deleting the tnaA Gene Encoding Tryptophanase

[1524] One of the precursor molecule to tryptophan in E. coli is phosphoenolpyruvate (PEP). Only 3% of available PEP is normally used to produce aromatic acids (that include tryptophan, phenylalanine and tyrosine). When E. coli is grown using glucose as a sole carbon source, 50% of PEP is used to import glucose into the cell using the phosphotransferase system (PTS). In order to increase tryptophan production, a non-PTS oxidized sugar, glucuronate, was used to test tryptophan secretion by the engineered E. coli Nissle strain ΔtrpR, tet-trpE^{fbr} DCBA, tet-aroG^{fbr}. In addition, the tnaA gene, encoding the tryptophanase enzyme, was deleted in the ΔtrpR, tet-trpE^{fbr} DCBA, tet-aroG^{fbr} strain in order to block the conversion of tryptophan into indole to obtain the ΔtrpRΔtnaA, tet-trp^{fbr} DCBA, tet-aroG^{fbr} strain.

[1525] The ΔtrpR, tet-trp^{fbr} DCBA, tet-aroG^{fbr} and ΔtrpRΔtnaA, tet-trpE^{fbr} DCBA, tet-aroG^{fbr} strains were grown in LB overnight with the appropriate antibiotics and subcultured 1/100 in 3 mL LB with antibiotics in culture tubes. After two hours of growth at 37 C at 250 rpm, 100 ng/mL anhydrotetracycline (ATC) was added to the culture to induce expression of the constructs. Two hours after induction, the bacterial cells were pelleted by centrifugation at 4,000 rpm for 5 min and resuspended in 3 mL M9 minimal media. Cells were spun down again at 4,000 rpm for 5 min, resuspended in 3 mL M9 minimal media with 1% glucose or 1% glucuronate and placed at 37 C at 250 rpm or at 37 C in an anaerobic chamber. 200 uL were collected at 3 h and 16 h and tryptophan was quantified by LC-MS/MS in the bacterial supernatant. FIG. 45B shows that tryptophan production is doubled in aerobic condition when the non-PTS oxidized sugar glucoronate was used. In addition, the deletion of tnaA had a positive effect on tryptophan production at the 3 h time point in both aerobic and anaerobic conditions and at the 16 h time point, only in anaerobic condition.

### Example 54. Improved Tryptophan Production by Increasing the Rate of Serine Biosynthesis in E. coli Nissle

[1526] The last step in the tryptophan biosynthesis in E. coli consumes one molecule of serine. In this example, we demonstrate that serine availability is a limiting factor for tryptophan production and describe the construction of the tryptophan producing E. coli Nissle strains ΔtrpRΔtnaA, tet-trpE^{fbr} DCBA, tet-aroG^{fbr} serA and ΔtrpRΔtnaA, tet-trpE^{fbr} DCBA, tet-aroG^{fbr} serA^{fbr} strains.

[1527] The ΔtrpRΔtnaA, tet-trpE^{fbr} DCBA, tet-aroG^{fbr} strain was grown in LB overnight with the appropriate antibiotics and subcultured 1/100 in 3 mL LB with antibiotics in culture tubes. After two hours of growth at 37 C at 250 rpm, 100 ng/mL anhydrotetracycline (ATC) was added to the culture to induce expression of the constructs. Two hours after induction, the bacterial cells were pelleted by centrifugation at 4,000 rpm for 5 min and resuspended in 3 mL M9 minimal media. Cells were spun down again at 4,000 rpm for 5 min, resuspended in 3 mL M9 minimal media with 1% glucuronate or 1% glucuronate and 10 mM serine and placed at 37 C an anaerobic chamber. 200 uL were collected at 3 h and 16 h and tryptophan was quantified by LC-MS/MS in the bacterial supernatant. FIG. 45C shows that tryptophan production is improved three-fold by serine addition.

[1528] In order to increase the rate of serine biosynthesis in the ΔtrpRΔtnaA, tet-trpE^{fbr} DCBA, tet-aroG^{fbr} strain, the serA gene from E. coli Nissle encoding the enzyme catalyzing the first step in the serine biosynthetic pathway was amplified by PCR and cloned into the tet-aroG^{fbr} plasmid by Gibson assembly. The newly generated tet-aroG^{fbr}-serA construct was then transformed into a ΔtrpRΔtnaA, tet-trpE^{fbr} DCBA strain to generate the ΔtrpRΔtnaA, tet-trpE^{fbr} DCBA, tet-aroG^{fbr}-serA strain. The tet-aroG^{fbr}-serA construct was further modified to encode a feedback resistant version of serA (serA^{fbr}). The newly generated tet-aroG^{fbr}-serA^{fbr} construct was used to produce the ΔtrpRΔtnaA, tet-trpE^{fbr} DCBA, tet-aroG^{fbr}-serA^{fbr} strain, optimized to improve the rate of serine biosynthesis and maximize tryptophan production.

### Example 55. Comparison of Various Tryptophan Producing Strains

[1529] Compare the rates of tryptophan production in the different strains generated, the following constructs and strains were generated according to methods and sequences described herein (e.g. Example 43), and assayed for tryptophan production in the presence of glucuronate as a carbon source under aerobic conditions. SYN2126 comprises ΔtrpRΔtnaA (ΔtrpRΔtnaA). SYN2323 comprises ΔtrpRΔtnaA and a tetracycline inducible construct for the expression of feedback resistant aroG on a plasmid (ΔtrpRΔtnaA, tet-aroGfbr). SYN2339 comprises ΔtrpRΔtnaA and a first tetracycline inducible construct for the expression of feedback resistant aroG on a first plasmid and a second tetracycline inducible construct with the genes of the trp operon with a feedback resistant form of trpE on a second plasmid (ΔtrpRΔtnaA, tet-aroGfbr, tet-trpEfbrDCBA). SYN2473 comprises ΔtrpRΔtnaA and a first tetracycline inducible construct for the expression of feedback resistant aroG and SerA on a first plasmid and a second tetracycline inducible construct with the genes of the trp operon with a feedback resistant form of trpE on a second plasmid (ΔtrpRΔtnaA, tet-aroGfbr-serA, tet-trpEfbrDCBA). SYN2476 comprises ΔtrpRΔtnaA and a tetracycline inducible construct with the genes of the trp operon with a feedback resistant form of trpE on a plasmid (ΔtrpRΔtnaA, tet-trpEfbrDCBA).

[1530] Overnight cultures were diluted 1/100 in 3 mL LB plus antibiotics and grown for 2 hours (37 C, 250 rpm). Next, cells were induced with 100 ng/mL ATC for 2 hours (37 C, 250 rpm), spun down, washed with cmL M9, spun down again and resuspended in 3 mL M9+1% glucuronate. Cells were plated for CFU counting. For the assay, the cells were placed af 37 C with shaking at 250 rpm. Supernatants were collected at 1 h, 2 h, 3 h, 4 h 16 h for HPLC analysis for tryptophan. As seen in FIG. 46, results indicate that expressing aroG is not sufficient nor necessary under these conditions to get Trp production and that expressing serA is beneficial for tryptophan production.

### Example 56. Bacterial Production of Indole Acetic Acid (IAA)

[1531] The ability of a strain comprising tryptophan production circuits and additionally Indole-3-pyruvate decarboxylase from Enterobacter cloacae (IpdC) and Indole-3-acetaldehyde dehydrogenase from Ustilago maydis (lad1) to produce indole acetic acid (IAA) was tested. The following strains were generated according to methods described herein and tested.

[1532] SYN2126: comprises ΔtrpR and ΔtnaA (ΔtrpRΔtnaA). SYN2339 comprises circuitry for the production of tryptophan; ΔtrpR and ΔtnaA, a first tetracline inducible trpEfbrDCBA construct on a first plasmid (pSC101), and a second tetracycline inducible aroGfbr construct on a second plasmid (ΔtrpRΔtnaA, tetR-Ptet-trpEfbrDCBA (pSC101), tetR-Ptet-aroGfbr (p15A)) (FIG. 40B). SYN2342 comprises the same tryptophan production circuitry as the parental strain SYN2339, and additionally comprises trpDH-ipdC-iad1 incorporated at the end of the second construct (ΔtrpRΔtnaA, tetR-Ptet-trpEfbrDCBA (pSC101), tetR-Ptet-aroGfbr-trpDH-ipdC-iad1 (p15A))(FIG. 43B).

[1533] Overnight cultures of the strains were diluted 1/100 in 3 mL LB plus antibiotics and grown for 2 hours (37 C, 250 rpm). Strains were then induced with 100 ng/mL ATC for 2 hours (37 C, 250 rpm). Cells were spun down, and resuspended in 1 mL M9+1% glucuronic acid and CFUs were quantified CFUs using the cellometer. Supernatants were collected at 1 h, 2.5 h and 18 h for LCMS analysis of tryptophan and indole acetic acid as described herein.

[1534] As seen in FIG. 49, SYN2126 produced no tryptophan, SYN2339 produces increasing tryptophan over the time points measured, and SYN2342 containing the additional IAA producing circuitry produces amounts of IAA that are comparable to the amounts of tryptophan produced in its parent SYN2339. No tryptophan is measured, indicating that all tryptophan produced in SYN2342 is efficiently converted into IAA.

### Example 57. Tryptamine Production Comparing Two Tryptophan Decarboxylases

[1535] The efficacy of two tryptophan decarboxylases (tdc), one from Catharanthus roseus (tdc_{Cr}) and a second from Clostridium sporogenes (tdc_{Cs}) in producing tryptamine from tryptophan was tested. The following strains were generated according to methods described herein and tested.

[1536] SYN2339 comprises ΔtrpR and ΔtnaA and a tetracycline inducible trpE^{fbr}DCBA construct on a plasmid and another tetracycline inducible construct expressing aroG^{fbr} on a second plasmid (ΔtrpRΔtnaA, tetR-Pₜₑₜ-trpE^{fbr}DCBA (pSC101), tetR-Pₜₑₜ-aroG^{fbr} (p15A)). SYN2339 is used as a control which can produce tryptophan but cannot convert it to tryptamine. SYN2340 comprises ΔtrpR and ΔtnaA and a tetracycline inducible trpE^{fbr}DCBA construct on a plasmid and another tetracycline inducible construct expressing aroG^{fbr} tdc_{Cr} on a second plasmid (ΔtrpRΔtnaA, tetR-Pₜₑₜ-trpE^{fbr}DCBA (pSC101), tetR-Pₜₑₜ-aroG^{fbr}-tdc_{Cr} (p15A)). SYN2794 comprises ΔtrpR and ΔtnaA and a tetracycline inducible trpE^{fbr}DCBA construct on a plasmid and another tetracycline inducible construct expressing aroG^{fbr} tdc_{Cs} on a second plasmid (ΔtrpRΔtnaA, tetR-Pₜₑₜ-trpE^{fbr}DCBA (pSC101), tetR-Pₜₑₜ-aroG^{fbr}-tdc_{Cs} (p15A)).

[1537] Overnight cultures of the strains were diluted 1/100 in 3 mL LB plus antibiotics and grown for 2 hours (37 C, 250 rpm). Strains were then induced with 100 ng/mL ATC for 2 hours (37 C, 250 rpm). Cells were spun down, and resuspended in 1 mL M9+1% glucuronic acid and CFUs were quantified CFUs using the cellometer. Supernatants were collected at 3 h and 18 h for LCMS analysis of tryptophan and tryptamine, as described herein.

[1538] As seen in FIG. 51, Tdc_{Cs} from Clostridium sporogenes is more efficient than Tdc_{Cr} from Catharanthus roseus in tryptamine production and converts all the tryptophan produced into tryptamine

### Example 58. Tryptophan and Anthranilic Acid Quantification in Bacterial Supernatant by LC-MS/MS

[1539] Tryptophan and Anthranilic acid stock (10 mg/mL) were prepared in 0.5N HCl, aliquoted in 1.5 mL microcentrifuge tubes (100 μL), and stored at −20° C. Standards (250, 100, 20, 4, 0.8, 0.16, 0.032 μg/mL) were prepared in water. Samples (10 pL) and standards were mixed with 90 μL of ACN/H2O (60:30, v/v) containing 1 μg/mL of Tryptophan-d5 in the final solution in a V-bottom 96-well plate. The plate was heat-sealed with a AlumASeal foil, mixed well, and centrifuged at 4000 rpm for 5 min. The solution (10 μL) was transferred into a round-bottom 96-well plate 90 uL 0.1% formic acid in water was added to the sample. The plate was again heat-sealed with a ClearASeal sheet and mixed well.

### LC-MS/MS Method

[1540] Tryptophan and Anthranilic acid were measured by liquid chromatography coupled to tandem mass spectrometry (LC-MS/MS) using a Thermo TSQ Quantum Max triple quadrupole mass spectrometer. Table 82, Table 83, and Table 84 provide the summary of the LC-MS/MS method.

TABLE 82
HPLC Method

| | |
|---|---|
| Column | Accucore aQ column, 2.6 μm (100 × 2.1 mm) |
| Mobile Phase A | 99.9% H2O, 0.1% Formic Acid |
| Mobile Phase B | 99.9% ACN, 0.1% Formic Acid |
| Injection volume | 10 uL |

TABLE 83
HPLC Method:

| Time (min) | Flow Rate (μL/min) | A % | B % |
|---|---|---|---|
| −0.5 | 350 | 100 | 0 |
| 0.5 | 350 | 100 | 0 |
| 1.0 | 350 | 10 | 90 |
| 2.5 | 350 | 10 | 90 |
| 2.51 | 350 | 100 | 10 |

TABLE 84
Tandem Mass Spectrometry

| | |
|---|---|
| Ion Source | HESI-II |
| Polarity | Positive |

SRM transitions

| | |
|---|---|
| Tryptophan | 205.1/118.2 |
| Anthranilic acid | 138.1/92.2 |
| Tryptophan-d5 | 210.1/151.1 |

### Example 59. Quantification of Tryptamine in Bacterial Supernatant by Liquid Chromatography-Mass Spectrometry (LC-MS)

[1541] Tryptamine acid stock (10 mg/mL) were prepared in 0.5N HCl, aliquoted in 1.5 mL microcentrifuge tubes (100 μL), and stored at −20° C. Standards (250, 100, 20, 4, 0.8, 0.16, 0.032 μg/mL) were prepared. Samples (10 μL) and standards were mixed with 90 μL of ACN/H2O (60:30, v/v) containing 1 μg/mL of tryptamine-d5 in the final solution in a V-bottom 96-well plate. The plate was heat-sealed with a AlumASeal foil, mixed well, and centrifuged at 4000 rpm for 5 min. The solution (10 μL) was transferred into a round-bottom 96-well plate 90 uL 0.1% formic acid in water was added to the sample. The plate was again heat-sealed with a ClearASeal sheet and mixed well.

### LC-MS/MS Method

[1542] Tryptamine was measured by liquid chromatography coupled to tandem mass spectrometry (LC-MS/MS) using a Thermo TSQ Quantum Max triple quadrupole mass spectrometer. Table 85, Table 86, and Table 87 provide the summary of the LC-MS/MS method.

TABLE 85
HPLC Method

| | |
|---|---|
| Column | Accucore aQ column, 2.6 μm (100 × 2.1 mm) |
| Mobile Phase A | 99.9% H2O, 0.1% Formic Acid |
| Mobile Phase B | 99.9% ACN, 0.1% Formic Acid |
| Injection volume | 10 uL |

TABLE 86
HPLC Method:

| Time (min) | Flow Rate (μL/min) | A % | B % |
|---|---|---|---|
| −0.5 | 350 | 100 | 0 |
| 0.5 | 350 | 100 | 0 |
| 1.0 | 350 | 10 | 90 |
| 2.5 | 350 | 10 | 90 |
| 2.51 | 350 | 100 | 10 |

TABLE 87
Tandem Mass Spectrometry

| | |
|---|---|
| Ion Source | HESI-II |
| Polarity | Positive |

SRM transitions

| | |
|---|---|
| Tryptamine | 161.1/144.1 |

### Example 60. Quantification of Tryptophan, Indole-3-Acetate, Indole-3-Lactate, Indole-3-Propionate in Bacterial Supernatant by High-Pressure Liquid Chromatography (HPLC)

[1543] Samples were thawed on ice and centrifuged at 3,220×g for 5 min at 4° C. 80 μL of the supernatant was pipetted, mixed with 20 μL 0.5% formic acid in water, and analyzed by HPLC using a Shimadzu Prominence-I. HPLC conditions used for the quantification of tryptophan, indole-3-acetate, indole-3-lactate and indole-3-propionate are described in Table 88.

TABLE 88
HPLC Analysis
Chromatography

| Calibration standards | 250, 100, 20, 4, 0.8 μg/mL | | |
|---|---|---|---|
| Column | Luna 3 μm C18(2) 100 Å, 100 × 2 mm | | |
| | (catalog# 00D-4251-B0) | | |
| Column Temperature | 40° C. | | |
| Injection Volume | 10 μL | | |
| Autosampler Temperature | 10° C. | | |
| Flow Rate | 0.5 mL/min | | |
| Mobile Phases | A: water, 0.1% FA | | |
| | B: acetonitrile, 0.1% FA | | |
| Gradient | Time (min) | % A | % B |
| | 0 | 90 | 10 |
| | 0.5 | 90 | 10 |
| | 3 | 10 | 90 |
| | 5 | 10 | 90 |
| | 5.01 | 90 | 10 |

| | |
|---|---|
| 7 | (end) |

Detection: Photodiode Array Detector (PDA)

| Polarity | Positive | |
|---|---|---|
| Start Wavelength | 190 nm | |
| End Wavelength | 800 nm | |
| Spectrum resolution | 512 | |
| Slit Width | 8 nm | |
| Compound | Wavelength (nm) | Retention time (min) |
| Tryptophan | 274 | 1.3 |
| Indole-3-acetate | 274 | 3.5 |
| Indole-lactate | 274 | 3.3 |
| Indole-3-propionate | 274 | 3.7 |

### Example 61. Biochemical Analysis of Butyrate Production in SYN1001

[1544] SYN1001 was assessed for its ability to produce butyrate in vitro. An overnight culture of LB-grown SYN1001 was diluted 1:100 into fresh LB (10 mL in a 125 mL baffled flask). The culture was grown aerobically with shaking at 250 rpm, 37° C. for 1.5 h. The culture was then moved into an anaerobic chamber (Coy Lab Products, MI) supplying an atmosphere of 85% N₂, 10% CO₂, and 5% H₂. Anaerobic incubation commenced at 37° C. for 4 hours in order to induce the expression of the butyrate operon from the P_{fnrS} promoter.

[1545] After the 4 hour anaerobic induction of the butyrate operon, the culture was removed from the anaerobic chamber and approximately 2×10⁸ activated cells were used to inoculate 1 mL of M9 minimal medium containing 0.5% glucose. Assay cultures were incubated statically at 37° C. for 18 hours in the presence of 02. For sample collection, 200 uL aliquots were removed from assay cultures and spun down at maximum speed for 1 min in a microcentrifuge. The culture supernatant was retained, and LC-MS-MS was used to determine the concentration of butyrate in the supernatant fraction (Table 89-data are average of assay performed in triplicate for three different manufacturing runs).

TABLE 89
Butyrate production in SYN1001 from three different experiments

| | Butyrate | | Butyrate | | Butyrate | |
|---|---|---|---|---|---|---|
| | (mM) | | (mM) | | (mM) | |
| Strain | Run 1 | SD | Run 2 | SD | Run 3 | SD |
| SYN94 | NA | NA | NA | NA | 0.474 | 0.002 |
| SYN2001 | NA | NA | NA | NA | 0.389 | 0.003 |
| SYN1001 | 6.371 | 0.530 | 6.131 | 0.100 | 6.982 | 0.577 |

[1546] Equivalent concentrations of butyrate were obtained from 3 independent production runs of SYN1001. In production run 3, SYN94 and SYN2001 control strains were included and supernatants from these strains contained negligible amounts of butyrate (0.47 and 0.38 mM respectively) compared to SYN1001, which contained significantly higher levels (6.98 mM; n=3). SYN94 is a streptomycin-resistant version of the parental E. coli Nissle strain. SYN2001 is an engineered E. coli strain that has been modified to over-produce acetate and does not contain a synthetic butyrate operon, described elsewhere herein. Run 3 culture supernatants were used to generate bioactivity in cell based assays described below.

### Example 62. Cell-Based Assay Development and In-Vitro Butyrate Strain Assessment

[1547] Methods

[1548] Mammalian Cell Culture:

[1549] HT-29 colon adenocarcinoma cells were obtained from ATCC (Cat #: HTB38). Cells were cultured at 37° C., 5% CO₂ in RPMI media supplemented with 10% FBS, 1% pen-strep (complete media). Cells were allowed to grow to ˜80% confluency before passaging for activity assays.

[1550] Alkaline Phosphatase (AP) Activity Assay:

[1551] HT-29 colon adenocarcinoma cells were plated in complete media at either 1×10⁵ cells/well (24 well plates) or 1×10⁴ cells/well (96 well plates) and allowed to recover overnight at 37° C., 5% CO₂. The following day media was replaced with fresh complete media containing either PBS, synthetic acetate (SIGMA-Cat # S8750) or butyrate (SIGMA-Cat # B5887), or bacterial supernatants of interest. Cells were incubated for 4 days under these conditions and then media was removed and cellular lysates were prepared (10 min on ice with vendor-supplied lysis buffer (BioVision-see below) followed by clarification for 10 min @14K rpm, 4° C.). Lysates from each condition were then assessed for AP activity using an alkaline phosphatase activity kit (BioVision, Cat # K412-500) according to manufacturer's recommendations.

[1552] Cell Viability Assay:

[1553] HT-29 colon adenocarcinoma cells were plated in 2 separate plates in complete media at either 1×10⁵ cells/well (24-well plates) or 1×10⁴ cells/well (96-well plates) and allowed to recover overnight at 37° C., 5% CO₂. The following day, one plate of cells, which served as the day 1 time point read out (input), was treated with trypsin (5 min at 37° C., 5% CO₂) and cells were counted using a Cellometer K2 instrument (Nexcelom). Live and dead cells were distinguished by trypan blue exclusion. For the remaining plate, media was replaced with fresh complete media containing either PBS, synthetic acetate or butyrate, or bacterial supernatants of interest. Cells were incubated for 4 days under these conditions and then media was removed. Cells were detached from plates with trypsin and counted using the Cellometer K2 as described above.

### In Vitro Assessment of Engineered Butyrate-Producing Strain SYN1001

[1554] To assess the activity of the butyrate-producing strain SYN001 in vitro, we employed the AP cell-based assay. HT-29 cells were plated in triplicate at 1×10⁴ cells/well 96-well plates in complete media and allowed to recover overnight. The following day, media was removed and fresh media containing a dilution series of exogenous synthetic butyrate (5 mM-0.3 mM), or culture supernatants from the SYN94 control (0.26 mM-0.016 mM), SYN1001 butyrate-producing strain (3.5 mM-0.11 mM) or SYN2001 acetate-producing strain (0.22 mM-0.01 mM) were added, and the cells were incubated for 4 days. After the incubation period, media was removed and the plates were processed for assessment of AP activity. FIG. 19B shows that incubation of HT-29 cells with the supernatants from the butyrate-producing SYN1001 strain demonstrated a similar AP activity profile to cells incubated with synthetic butyrate. In contrast, the unengineered strain SYN94 or the acetate-producing strain SYN2001 had little to no effect on AP activity at any concentration tested. To better visualize the similarity in AP activity induction between synthetic butyrate and SYN1001-produced butyrate, the values from the AP activity assay were fit to a non-linear equation algorithm and graphed. As shown in FIG. 19C, the activity profile for butyrate produced by SYN1001 is comparable to synthetic butyrate. Incubation with synthetic butyrate, SYN94, SYN1001 or SYN2001 did not have any appreciable effect on cell viability (Data not shown)

### Summary

[1555] The results describe the design and evaluation of an engineered, butyrate-producing strain, SYN1001, which contains a modified butyrate module comprised of the trans-2-enoyl-CoA reductase (ter) gene from Treponema denticola, the thiolase (thiA1), 3-hydroxybutyryl-CoA dehydrogenase (hbd), and crotonase (crt2) genes from Clostridium difficile, and the thioesterase B gene (tesB), which is endogenous to E. coli. SYN1001 is capable of producing ˜7 mM butyrate in vitro under the conditions described here. This in vitro butyrate production translates to activity in a cell-based assay that is comparable on an equimolar basis to that observed with pure, synthetic butyrate. Table 90. summarizes the final pharmacological characteristics of the SYN1001.

TABLE 90
Final characterization of the pharmacological
characteristics of SYN1001

| | Run 3 | | | |
|---|---|---|---|---|
| | [Butyrate] | | AP Activity | |
| | secreted | | at max dose | |
| | (in mM) | SD | (in U/mg prot) | SD |
| SYN94 | 0.474 | 0.002 | 0.96 | 0.052 |
| SYN2001 | 0.389 | 0.003 | 0.95 | 0.047 |
| SYN1001 | 6.982 | 0.577 | 3.97 | 0.36 |

### Example 63. In Vitro Assessment of the Engineered Acetate-Producing Strain SYN2001

[1556] To evaluate the activity of acetate-producing strains, we employed a cell-based assay based on work by Cox et al. (Cox et al., WGJ, 15(44), 2009) where the authors demonstrated that the addition of acetate inhibited LPS-induced secretion of IFNγ in human PBMC cells.

[1557] To assess the activity of the acetate-producing strain SYN2001 in vitro, we employed the LPS-induction of IFNγ cell-based assay. Frozen normal human PBMCs from two independent donors (Lot #'s A4956 and A4924) were plated in triplicate at 1×10⁶ cells/mL in 96-well plates in complete media. The cells were then incubated for 15 minutes with media containing either a dilution series of synthetic acetate (40 mM-0.08 Mm), SYN2001 supernatant (30 mM-0.03 mM acetate concentrations based on LC-MS determination) or untreated (negative control). After the 15-minute incubation period, complete media containing LPS was added to the cells to a final concentration of 100 ng/mL and the cells were further incubated overnight under these conditions. The following day supernatants were harvested from each of the different conditions and the IFNγ levels assessed by ELISA. FIG. 26G and FIG. 26H show the results from 3 independent experiments (each performed in triplicate) with the two different donors (donor 1=D1; donor 2=D2) in which incubation of primary human PBMC cells with exogenous acetate that was either synthetic or derived from SYN2001 supernatants led to a dose-dependent decrease in the LPS-induced secretion of IFNγ by the cells. We noted that the absolute levels of IFNγ production in the SYN2001 experiments was higher than in the purified acetate experiments, likely due to residual additional LPS in the supernatants from the bacterially-derived acetate. Nonetheless, the IC50s observed for the two acetate sources were very similar. Table 91 summarizes the data from the 3 experiments using the 2 separate donors.

TABLE 91
Summary of EC50's for SYN2001 on LPS-induced IFNγ
secretion from 3 experiments performed in triplicate
with human PBMC cells from 2 separate donors.

| | Donor 1 | Donor 2 |
|---|---|---|
| Acetate (mM) | 3.12 | 2.18 |
| SEM | 0.29 | 0.38 |
| SYN1592 (mM) | 5.44 | 3.96 |
| SEM | 0.92 | 0.19 |

[1558] In conclusion, results presented describe the design and evaluation of an engineered, acetate-producing strain, SYN2001, which contains an enhanced acetate biosynthetic program resulting from deletion of the L-lactate dehydrogenase A (ldhA) gene to block the carbon flux from pyruvate to lactate, greatly improving acetate biosynthesis in E. coli Nissle. This strain is capable of producing >30 mM acetate in vitro under the conditions described here. This in vitro acetate production translates to activity in a cell-based assay that is comparable on an equimolar basis to that observed with pure, synthetic acetate. The final pharmacological characterization of SYN2001 is summarized in Table 92.

TABLE 92
Final pharmacological characterization of SYN2001

| | Run 3 | | | | |
|---|---|---|---|---|---|
| | [Acetate] | EC50- | | EC50- | |
| | secreted | donor 1 | | donor 2 | |
| | (mM) | (mM) | SEM | (mM) | SEM |
| SYN2001 | 31.58 | 5.44 | 0.92 | 3.96 | 0.19 |
| Acetate | NA | 3.12 | 0.39 | 2.18 | 0.28 |
| (synthetic) | | | | | |

### Example 64. Generation and Analysis of an Engineered IL-22-Producing E. coli Nissle Strain

### Engineering and Production of IL-22

[1559] A synthetic construct was generated in which expression of IL-22 is controlled by the tetracycline-inducible promoter (Pₜₑₜ), which is derepressed via the addition of the tetracycline analog anhydrotetracycline (aTc), and translation is driven by a strong ribosome binding site (RBS) located immediately upstream from the IL-22 coding sequence. To promote translocation to the periplasm, a 21-amino acid PhoA-secretion tag was added to the N-terminus of IL-22.

[1560] The corresponding engineered element was constructed using a synthetic DNA cassette encoding the IL-22 protein coding sequence (IDT Technologies, Coralville, Iowa) which was cloned into an initial plasmid vector, creating the plasmid Logic435. The IL-22 sequence was later amplified and cloned using Gibson assembly technology and the NEBuilder Hifi Mastermix (NEB). The final pBR322-based plasmid was sequence-verified by Sanger sequencing (Genewiz) and designated Logic522.

[1561] To create a Gram-negative bacterium capable of secreting bioactive proteins, a diffusible outer membrane (DOM) phenotype was engineered in the E. coli Nissle background. A series of DOM mutants were created by deleting different periplasmic proteins leading to a ‘leaky’ phenotype. Deletions of several different genes were tested including lpp, pal, tolA and nlpl. For example, the pal mutant (SYN3000) showed a good secretion phenotype with little-to-no deleterious effect on growth rate while supporting strong production of effectors in the extracellular medium. Logic522 was inserted into SYN3000 to create the IL-22 secretion strain, SYN3001.

[1562] To assay for production of IL-22, cultures were grown and induced, then supernatants were harvested and quantified using ELISA. Overnight cultures were harvested by centrifugation at 12.5K×g for 5 minutes. The supernatants of the cultures were removed from the cell pellet and filtered through a 0.22 μm filter to separate any remaining bacteria from the supernatant. This supernatant was run immediately in the ELISA, stored short-term at 4° C., or aliquoted and stored at −20° C.

[1563] To evaluate the production of IL-22 in the filtered supernatants, samples of SYN3000 and SYN3001 were diluted in triplicate and run on an R&D Systems IL-22 Quantikine® ELISA Kit (Minneapolis, Minn.). The results from 3 independent production runs are shown in Table 93. The results demonstrated that the SYN3001 supernatants contained an average of 312 ng/ml (+/−11.38) of material that reacted positively in the IL-22 ELISA assay. In contrast, the SYN3000 supernatants had undetectable levels (not shown). Culture supernatant from run 3 was then used to generate the bioactivity results from the cell based assays described below.

TABLE 93
SYN3001 supernatant results from three different production runs.

| | Run1 | | Run 2 | | Run 3 | |
|---|---|---|---|---|---|---|
| | [IL-22] | | [IL-22] | | [IL-22] | |
| Strain | in ng/ml | SD | in ng/ml | SD | in ng/ml | SD |
| SYN3001 | 325.01 | 8.40 | 303.56 | 2.94 | 307.67 | 6.21 |

### In Vitro Assessment of IL-22 Produced by the Engineered Strain SYN3001

[1564] To assess the biological activity of IL-22 produced by SYN3001 (IL-22 secreting strain), titrations of SYN3001 and SYN3000 (DOM mutant, non IL-22 secreting negative control strain) supernatants (starting at 150 ng/mL and titrated in 1:3 dilutions) were added to Colo205 cells and the activation of STAT3 was assessed. FIG. 33C shows the results from 5 independent experiments (each performed in triplicate). Supernatants from SYN3001 induced activation of STAT3 with an average EC50 of 4.8 ng/mL (+/−1.74 ng/mL). In contrast, SYN3000 had no effect on STAT3 activity.

[1565] To verify that the STAT3 activation elicited by supernatants from SYN3001 was indeed due to IL-22 signaling, Colo205 cells were stimulated with IL-22 supernatants derived from SYN3001 at 3 ng/mL in the presence of increasing concentrations of an anti-IL-22 neutralizing antibody. rLI-22 in the absence of the neutralizing antibody served as a positive control. FIG. 33D shows the results from 3 independent experiments (performed in triplicate), demonstrating that the anti-IL-22 antibody inhibited SYN3001-induced activation of STAT3 in a dose-dependent manner. The average IC50 for the anti-IL-22 antibody mediated inhibition of SYN3001-derived IL-22 was 3.45 ng/mL for SYN3001, in line with the value observed using rIL-22, 3.70 ng/mL.

### Summary

[1566] The results describe the design and evaluation of an engineered IL-22 producing strain, SYN3001, which contains a tetracycline-inducible promoter driving the expression of IL-22 fused to a cleavable PhoA-secretion tag to mediate Sec-dependent secretion into the periplasm and a pal mutation to create a diffusible outer membrane phenotype (DOM) that facilitates extracellular secretion. This strain is capable of producing >300 ng/mL IL-22 in vitro under the conditions described here. This in vitro IL-22 production translates to biological activity in a cell-based assay that is comparable to that observed with recombinant IL-22. In addition, the specific activity of the bacterially-produced IL-22 was verified by demonstrating that this signal could be inhibited by a neutralizing antibody against IL-22. Table 94 summarizes the final pharmacological characteristics of SYN3001.

TABLE 94
Final characterization of the pharmacological
characteristics of SYN300

| | Run 3 | | | | | |
|---|---|---|---|---|---|---|
| | [IL-22] | | | | | |
| | secreted | | EC50 | | IC50 | |
| | (ng/mL) | SD | (ng/mL) | SD | (ng/mL) | SD |
| SYN3001 | 307.7 | 6.21 | 4.80 | 1.74 | 3.45 | 0.37 |
| rIL-22 | NA | NA | 1.56 | 0.82 | 3.70 | 0.52 |

### Example 65. Generation and Testing of an IL-10 Producing Strain

### Strain Construction

[1567] In order to generate strains which secrete human IL-10, a base strain was used which has a “leaky membrane” phenotype (SYN557), comprising delta PAL DOM background). For plasmid-based secretion construct, a codon optimized human IL10 sequence was combined with a number of secretion signals to determine the optimal configuration. Recently the Nissle genome was mined bioinformatically for signal sequences larger than the 21 AA PhoA tag. This yielded several candidates including the signal sequences from: ECOLIN_05715 (52 AA), ECOLIN_16495 (40 AA), ECOLIN_19410 (33 AA) and ECOLIN_19880 (53 AA). These signal sequences, were codon optimized and synthesized along with optimized RBS sequences, then inserted upstream of an optimized hIL10 sequence in a high copy pUC57 backbone. All of the candidate hIL10 constructs were then transformed into the delta PAL DOM background to test for secretion.

Production of hIL10 for In Vitro Quantification

[1568] To assay for production of bioactive hIL10 from E. coli Nissle, candidate strains were grown, induced and supernatants harvested and filter sterilized. These supernatants were then quantified via ELISA for hIL10 concentration corresponding to secreted hIL10.

[1569] Briefly, overnight cultures were used to inoculate 50 mL starter cultures of 2YT broth at a 1:50 dilution, and bacteria were grown for 2 hours and harvested by centrifugation at 12.8K×g for 5 minutes. The pellet was resuspended in 50 mL of fresh 2YT media with aTc (100 ug/mL) and appropriate antibiotic, and cells were induced at 30 C for an additional 4 hours to allow expression and secretion of hIL10. Supernatants were harvested via centrifugation and filtration through a 0.22 micron PVDF filter then used for Western blot analysis and in BD OptEIA Human IL10 ELISA Kit II (Cat. No. 550613) both according to manufacturers instruction. FIG. 33E depicts a Western blot analysis of bacterial supernatants from strain SYN2980 and SYN2982, using IL-10 antibody (IL-10 (D13A11) XP® Rabbit mAb #12163, Cell Signaling Technology). The secreted polypeptide has the same molecular weight as the standards, indicating that the signal sequence is cleaved from the native peptide. Results from the ELISA are shown in Table 95A. Selected secretion sequences are shown in Table 95B.

TABLE 95A
ELISA results

| | | | [hIL10] |
|---|---|---|---|
| STRAIN | Genotype | Circuit | (ng/mL) |
| SYN1557 | pal::Cm | None | 0 |
| SYN2898 | pal::Cm | Ptet-OmpFss-hIL10 p15a | 37 |
| SYN2890 | pal::Cm | Ptet-ECOLIN_05715ss-hIL10 pUC57 | 84 |
| SYN2892 | pal::Cm | Ptet-ECOLIN_19410ss-hIL10 pUC57 | 306 |
| SYN2893 | pal::Cm | Ptet-ECOLIN_19880ss-hIL10 pUC57 | 224 |

TABLE 95B
Selected Sequences

| Description | Sequences |
|---|---|
| Construct | CAATATCCTCGTAATCCTAAGGACGCCACTATGAAACGCCATCTGAAC |
| comprising RBS- | ACCTCCTATCGCTTAGTCTGGAACCATATTACCGGTGCTTTCGTTGTTG |
| ECOLIN_05715 | CATCAGAGCTGGCCCGCGCTCGTGGTAAGCGTGCAGGCGTGGCGGTA |
| Secretion signal- | GCCTTAAGCCTGGCAGCAGCAACATCTTTGCCTGCGTTAGCATCGCCA |
| codon optimized | GGTCAAGGAACGCAGTCAGAGAATTCATGCACTCACTTTCCGGGCAAT |
| IL-10 | CTGCCGAATATGCTGCGCGATCTGCGAGATGCATTCTCTCGCGTGAAA |
| SEQ ID NO: | ACGTTCTTTCAAATGAAAGATCAACTGGATAATCTGCTGCTGAAGGAG |
| | TCGTTGTTGGAGGATTTTAAGGGGTATCTGGGTTGTCAAGCACTGTCT |
| | GAAATGATTCAATTTTACTTGGAGGAAGTTATGCCGCAAGCGGAAAAC |
| | CAAGATCCGGATATTAAGGCGCACGTGAACTCACTGGGCGAAAACCT |
| | GAAAACTTTGCGCCTGCGTCTGAGACGATGTCACCGATTCCTGCCGTG |
| | TGAAAACAAGTCAAAGGCGGTTGAGCAAGTTAAGAATGCTTTCAATA |
| | AGCTGCAAGAAAAGGGCATCTATAAAGCGATGTCTGAATTTGATATCT |
| | TTATAAACTACATAGAAGCTTATATGACTATGAAGATTCGAAATTAA |
| RBS | CAATATCCTCGTAATCCTAAGGACGCCACT |
| SEQ ID NO: | |
| ECOLIN_05715 | ATGAAACGCCATCTGAACACCTCCTATCGCTTAGTCTGGAACCATATT |
| Secretion signal | ACCGGTGCTTTCGTTGTTGCATCAGAGCTGGCCCGCGCTCGTGGTAAG |
| SEQ ID NO: | CGTGCAGGCGTGGCGGTAGCCTTAAGCCTGGCAGCAGCAACATCTTTG |
| | CCTGCGTTAGCA |
| codon optimized | TCGCCAGGTCAAGGAACGCAGTCAGAGAATTCATGCACTCACTTTCCG |
| IL-10 | GGCAATCTGCCGAATATGCTGCGCGATCTGCGAGATGCATTCTCTCGC |
| SEQ ID NO: | GTGAAAACGTTCTTTCAAATGAAAGATCAACTGGATAATCTGCTGCTG |
| | AAGGAGTCGTTGTTGGAGGATTTTAAGGGGTATCTGGGTTGTCAAGCA |
| | CTGTCTGAAATGATTCAATTTTACTTGGAGGAAGTTATGCCGCAAGCG |
| | GAAAACCAAGATCCGGATATTAAGGCGCACGTGAACTCACTGGGCGA |
| | AAACCTGAAAACTTTGCGCCTGCGTCTGAGACGATGTCACCGATTCCT |
| | GCCGTGTGAAAACAAGTCAAAGGCGGTTGAGCAAGTTAAGAATGCTT |
| | TCAATAAGCTGCAAGAAAAGGGCATCTATAAAGCGATGTCTGAATTTG |
| | ATATCTTTATAAACTACATAGAAGCTTATATGACTATGAAGATTCGAA |
| | ATTAA |
| Construct | TTAACAAAGATAGTTATCGCAGTAGGAGGCCCCCATGTTTTGGCGCGA |
| comprising RBS- | CATGACACTTTCGGTGTGGCGCAAAAAAACGACTGGCCTTAAAACTAA |
| ECOLIN_16495 | GAAGCGTTTACTGGCTTTGGTATTGGCTGCTGCATTGTGCTCAAGCCCT |
| Secretion signal- | GTCTGGGCGTCGCCAGGTCAAGGAACGCAGTCAGAGAATTCATGCAC |
| codon optimized | TCACTTTCCGGGCAATCTGCCGAATATGCTGCGCGATCTGCGAGATGC |
| IL-10 | ATTCTCTCGCGTGAAAACGTTCTTTCAAATGAAAGATCAACTGGATAA |
| SEQ ID NO: | TCTGCTGCTGAAGGAGTCGTTGTTGGAGGATTTTAAGGGGTATCTGGG |
| | TTGTCAAGCACTGTCTGAAATGATTCAATTTTACTTGGAGGAAGTTAT |
| | GCCGCAAGCGGAAAACCAAGATCCGGATATTAAGGCGCACGTGAACT |
| | CACTGGGCGAAAACCTGAAAACTTTGCGCCTGCGTCTGAGACGATGTC |
| | ACCGATTCCTGCCGTGTGAAAACAAGTCAAAGGCGGTTGAGCAAGTT |
| | AAGAATGCTTTCAATAAGCTGCAAGAAAAGGGCATCTATAAAGCGAT |
| | GTCTGAATTTGATATCTTTATAAACTACATAGAAGCTTATATGACTATG |
| | AAGATTCGAAATTAA |
| RBS | TTAACAAAGATAGTTATCGCAGTAGGAGGCCCCC |
| SEQ ID NO: | |
| ECOLIN_16495 | ATGTTTTGGCGCGACATGACACTTTCGGTGTGGCGCAAAAAAACGACT |
| Secretion signal | GGCCTTAAAACTAAGAAGCGTTTACTGGCTTTGGTATTGGCTGCTGCA |
| SEQ ID NO: | TTGTGCTCAAGCCCTGTCTGGGCG |
| codon optimized | TCGCCAGGTCAAGGAACGCAGTCAGAGAATTCATGCACTCACTTTCCG |
| IL-10 | GGCAATCTGCCGAATATGCTGCGCGATCTGCGAGATGCATTCTCTCGC |
| SEQ ID NO: | GTGAAAACGTTCTTTCAAATGAAAGATCAACTGGATAATCTGCTGCTG |
| | AAGGAGTCGTTGTTGGAGGATTTTAAGGGGTATCTGGGTTGTCAAGCA |
| | CTGTCTGAAATGATTCAATTTTACTTGGAGGAAGTTATGCCGCAAGCG |
| | GAAAACCAAGATCCGGATATTAAGGCGCACGTGAACTCACTGGGCGA |
| | AAACCTGAAAACTTTGCGCCTGCGTCTGAGACGATGTCACCGATTCCT |
| | GCCGTGTGAAAACAAGTCAAAGGCGGTTGAGCAAGTTAAGAATGCTT |
| | TCAATAAGCTGCAAGAAAAGGGCATCTATAAAGCGATGTCTGAATTTG |
| | ATATCTTTATAAACTACATAGAAGCTTATATGACTATGAAGATTCGAA |
| | ATTAA |
| Construct | TCAACTCAGTCTACAACATCGGAGGTTAAGAATGGGGTACAAAATGA |
| comprising RBS- | ACATTAGCTCGCTTCGCAAAGCATTCATTTTTATGGGGGCTGTTGCAG |
| ECOLIN_19410 | CTTTAAGCCTTGTCAATGCCCAGTCAGCGCTTGCCTCGCCAGGTCAAG |
| Secretion signal- | GAACGCAGTCAGAGAATTCATGCACTCACTTTCCGGGCAATCTGCCGA |
| | ATATGCTGCGCGATCTGCGAGATGCATTCTCTCGCGTGAAAACGTTCT |
| codon optimized | TTCAAATGAAAGATCAACTGGATAATCTGCTGCTGAAGGAGTCGTTGT |
| IL-10 | TGGAGGATTTTAAGGGGTATCTGGGTTGTCAAGCACTGTCTGAAATGA |
| SEQ ID NO: | TTCAATTTTACTTGGAGGAAGTTATGCCGCAAGCGGAAAACCAAGATC |
| | CGGATATTAAGGCGCACGTGAACTCACTGGGCGAAAACCTGAAAACT |
| | TTGCGCCTGCGTCTGAGACGATGTCACCGATTCCTGCCGTGTGAAAAC |
| | AAGTCAAAGGCGGTTGAGCAAGTTAAGAATGCTTTCAATAAGCTGCA |
| | AGAAAAGGGCATCTATAAAGCGATGTCTGAATTTGATATCTTTATAAA |
| | CTACATAGAAGCTTATATGACTATGAAGATTCGAAATTAA |
| RBS | TCAACTCAGTCTACAACATCGGAGGTTAAGA |
| SEQ ID NO: | |
| ECOLIN_19410 | ATGGGGTACAAAATGAACATTAGCTCGCTTCGCAAAGCATTCATTTTT |
| Secretion signal | ATGGGGGCTGTTGCAGCTTTAAGCCTTGTCAATGCCCAGTCAGCGCTT |
| SEQ ID NO: | GCC |
| codon optimized | TCGCCAGGTCAAGGAACGCAGTCAGAGAATTCATGCACTCACTTTCCG |
| IL-10 | GGCAATCTGCCGAATATGCTGCGCGATCTGCGAGATGCATTCTCTCGC |
| SEQ ID NO: | GTGAAAACGTTCTTTCAAATGAAAGATCAACTGGATAATCTGCTGCTG |
| | AAGGAGTCGTTGTTGGAGGATTTTAAGGGGTATCTGGGTTGTCAAGCA |
| | CTGTCTGAAATGATTCAATTTTACTTGGAGGAAGTTATGCCGCAAGCG |
| | GAAAACCAAGATCCGGATATTAAGGCGCACGTGAACTCACTGGGCGA |
| | AAACCTGAAAACTTTGCGCCTGCGTCTGAGACGATGTCACCGATTCCT |
| | GCCGTGTGAAAACAAGTCAAAGGCGGTTGAGCAAGTTAAGAATGCTT |
| | TCAATAAGCTGCAAGAAAAGGGCATCTATAAAGCGATGTCTGAATTTG |
| | ATATCTTTATAAACTACATAGAAGCTTATATGACTATGAAGATTCGAA |
| | ATTAA |
| Construct | CCCGTATAACACTAAGAGAGGCGAATTAGAGTATGAATAAGATTTTCA |
| comprising RBS- | AGGTCATTTGGAATCCTGCGACCGGAAGCTACACGGTTGCAAGTGAA |
| ECOLIN_19880 | ACCGCTAAATCCCGTGGAAAAAAGAGTGGCCGCAGTAAATTACTTATC |
| Secretion signal- | TCTGCTTTGGTCGCAGGAGGGTTATTATCCTCATTCGGCGCTTCAGCGT |
| codon optimized | CGCCAGGTCAAGGAACGCAGTCAGAGAATTCATGCACTCACTTTCCGG |
| IL-10 | GCAATCTGCCGAATATGCTGCGCGATCTGCGAGATGCATTCTCTCGCG |
| SEQ ID NO: | TGAAAACGTTCTTTCAAATGAAAGATCAACTGGATAATCTGCTGCTGA |
| | AGGAGTCGTTGTTGGAGGATTTTAAGGGGTATCTGGGTTGTCAAGCAC |
| | TGTCTGAAATGATTCAATTTTACTTGGAGGAAGTTATGCCGCAAGCGG |
| | AAAACCAAGATCCGGATATTAAGGCGCACGTGAACTCACTGGGCGAA |
| | AACCTGAAAACTTTGCGCCTGCGTCTGAGACGATGTCACCGATTCCTG |
| | CCGTGTGAAAACAAGTCAAAGGCGGTTGAGCAAGTTAAGAATGCTTT |
| | CAATAAGCTGCAAGAAAAGGGCATCTATAAAGCGATGTCTGAATTTG |
| | ATATCTTTATAAACTACATAGAAGCTTATATGACTATGAAGATTCGAA |
| | ATTAA |
| RBS | CCCGTATAACACTAAGAGAGGCGAATTAGAGT |
| SEQ ID NO: | |
| ECOL1N_19880 | ATGAATAAGATTTTCAAGGTCATTTGGAATCCTGCGACCGGAAGCTAC |
| Secretion signal | ACGGTTGCAAGTGAAACCGCTAAATCCCGTGGAAAAAAGAGTGGCCG |
| SEQ ID NO: | CAGTAAATTACTTATCTCTGCTTTGGTCGCAGGAGGGTTATTATCCTCA |
| | TTCGGCGCTTCAGCG |
| codon optimized | TCGCCAGGTCAAGGAACGCAGTCAGAGAATTCATGCACTCACTTTCCG |
| IL-10 | GGCAATCTGCCGAATATGCTGCGCGATCTGCGAGATGCATTCTCTCGC |
| SEQ ID NO: | GTGAAAACGTTCTTTCAAATGAAAGATCAACTGGATAATCTGCTGCTG |
| | AAGGAGTCGTTGTTGGAGGATTTTAAGGGGTATCTGGGTTGTCAAGCA |
| | CTGTCTGAAATGATTCAATTTTACTTGGAGGAAGTTATGCCGCAAGCG |
| | GAAAACCAAGATCCGGATATTAAGGCGCACGTGAACTCACTGGGCGA |
| | AAACCTGAAAACTTTGCGCCTGCGTCTGAGACGATGTCACCGATTCCT |
| | GCCGTGTGAAAACAAGTCAAAGGCGGTTGAGCAAGTTAAGAATGCTT |
| | TCAATAAGCTGCAAGAAAAGGGCATCTATAAAGCGATGTCTGAATTTG |
| | ATATCTTTATAAACTACATAGAAGCTTATATGACTATGAAGATTCGAA |
| | ATTAA |

### Functional Assays

[1570] Co-Culture Studies

[1571] To determine whether the hIL-10 expressed by the genetically engineered bacteria is biologically functional, in vitro experimentation is conducted, in which the bacterial supernatant containing secreted human IL-10 is added to the growth medium of THP-1 cells. IL-10 is known to induce the phosphorylation of STAT1 and STAT3 in these cells. Functional activity of bacterially secreted IL-10 is therefore assessed by its ability to phosphorylate STAT3 in THP-1 cells.

[1572] THP-1 cells are grown in Dulbecco's modified Eagle's medium supplemented with 10% fetal bovine serum at 37° C. in a humidified incubator supplemented with 5% CO2. Prior to treatment with the bacterial supernatant, THP-1 (1e6/24 well) are serum starved overnight. Titrations of either recombinant human IL-10 diluted in LB or clarified supernatant from wild type Nissle or the engineered bacteria are added to cells for 30 minutes. Cells are harvested and resuspended in lysis buffer, and phospho-STAT3 ELISA (ELISA pSTAT3 (Tyr705) (Cell Signaling Technology)) is run in triplicate for all samples, according to manufacturer's instructions. PBS-treated cells and PBS are added as negative controls. Dilutions of samples are included to demonstrate linearity. No signal is observed for wild type Nissle. Activity for the engineered strain comprising a PAL deletion and the integrated construct encoding hIL-10 with a various secretion tags as listed in Table 95 above are measured.

[1573] Competition Studies

[1574] As an additional control for specificity, a competition assay is performed. Titrations of anti-IL10 antibody are pre-incubated with constant concentrations of either rhIL10 (data not shown) or supernatants from the engineered bacteria for 15 min. Next, the supernatants/rhIL-10solutions are added to serum-starved THP-1 cells (1e6/well) and cells are incubated for 30 min followed by pSTAT3 ELISA as described above.

### Example 66. Assessment of In Vitro and In Vivo Activity of Biosafety System Containing Strain

[1575] The activity of the following strains is tested:

[1576] SYN-1001 comprises a construct shown in FIG. 74C knocked into the dapA locus on the bacterial chromosome (low copy RBS; dapA::constitutive prom1 (BBA_J26100)-Pi(R6K)-constitutive promoter 2(P1)-Kis antitoxin). The strain further comprises a plasmid shown in FIG. 74A, except that the bla gene is replaced with the construct of FIG. 24C (OmpF-hGLP-1). On other embodiments, other inducible or constitutive promoters are used.

[1577] SYN-1002 comprises a construct shown in FIG. 74C knocked into the dapA locus on the bacterial chromosome (low copy RBS; dapA::constitutive prom1 (BBA_J26100)-Pi(R6K)-constitutive promoter 2(P1)-Kis antitoxin). The strain further comprises a plasmid shown in FIG. 74A, except that the bla gene is replaced with the construct of FIG. 24D (OmpF-hGLP-1). On other embodiments, other inducible or constitutive promoters are used.

[1578] SYN-1003 comprises a construct shown in FIG. 74D knocked into the dapA locus on the bacterial chromosome (medium copy RBS; dapA::constitutive prom1 (BBA_J26100)-Pi(R6K)-constitutive promoter 2(P1)-Kis antitoxin). The strain further comprises a plasmid shown in FIG. 74A, except that the bla gene is replaced with the construct of FIG. 24C (OmpF-hGLP-1). On other embodiments, other inducible or constitutive promoters are used.

[1579] SYN-1004 comprises a construct shown in FIG. 74D knocked into the dapA locus on the bacterial chromosome (medium copy RBS; dapA::constitutive prom1 (BBA_J26100)-Pi(R6K)-constitutive promoter 2(P1)-Kis antitoxin). The strain further comprises a plasmid shown in FIG. 74A, except that the bla gene is replaced with the construct of FIG. 24D (OmpF-hGLP-1). On other embodiments, other inducible or constitutive promoters are used.

[1580] SYN-1005 comprises a construct shown in FIG. 74C knocked into the thyA locus on the bacterial chromosome (low copy RBS; thyA::constitutive prom1 (BBA_J26100)-Pi(R6K)-constitutive promoter 2(P1)-Kis antitoxin). The strain further comprises a plasmid shown in FIG. 74B, except that the bla gene is replaced with the construct of FIG. 24C (OmpF-hGLP-1). On other embodiments, other inducible or constitutive promoters are used.

[1581] SYN-1006 comprises a construct shown in FIG. 74C knocked into the thyA locus on the bacterial chromosome (low copy RBS; thyA::constitutive prom1 (BBA_J26100)-Pi(R6K)-constitutive promoter 2(P1)-Kis antitoxin). The strain further comprises a plasmid shown in FIG. 74B, except that the bla gene is replaced with the construct of FIG. 24D (OmpF-hGLP-1). On other embodiments, other inducible or constitutive promoters are used.

[1582] SYN-1007 comprises a construct shown in FIG. 74D knocked into the thyA locus on the bacterial chromosome (medium copy RBS; thyA::constitutive prom1 (BBA_J26100)-Pi(R6K)-constitutive promoter 2(P1)-Kis antitoxin). The strain further comprises a plasmid shown in FIG. 74B, except that the bla gene is replaced with the construct of FIG. 24D (OmpF-hGLP-1). On other embodiments, other inducible or constitutive promoters are used.

[1583] SYN-1008 a construct shown in FIG. 74D knocked into the thyA locus on the bacterial chromosome (medium copy RBS; thyA::constitutive prom1 (BBA_J26100)-Pi(R6K)-constitutive promoter 2(P1)-Kis antitoxin). The strain further comprises a plasmid shown in FIG. 74B, except that the bla gene is replaced with the construct of FIG. 24D (OmpF-hGLP-1). On other embodiments, other inducible or constitutive promoters are used.

[1584] SYN-1009 a construct shown inf FIG. 74C knocked into the dapA locus on the bacterial chromosome (low copy RBS; dapA::constitutive prom1 (BBA_J26100)-Pi(R6K)-constitutive promoter 2(P1)-Kis antitoxin). The strain further comprises a plasmid shown in FIG. 74A, except that the bla gene is replaced with the construct of FIG. 8A (FNR-ter/pbt-buk butyrate cassette). On other embodiments, other inducible or constitutive promoters are used.

[1585] SYN-1011 comprises a construct shown in FIG. 74D knocked into the dapA locus on the bacterial chromosome (medium copy RBS; dapA::constitutive prom1 (BBA_J26100)-Pi(R6K)-constitutive promoter 2(P1)-Kis antitoxin). The strain further comprises a plasmid shown in FIG. 74A, except that the bla gene is replaced with the construct of FIG. 8A (FNR-ter/pbt-buk butyrate cassette). On other embodiments, other inducible or constitutive promoters are used.

[1586] SYN-1013 comprises a construct shown in FIG. 74C knocked into the thyA locus on the bacterial chromosome (low copy RBS; thyA::constitutive prom1 (BBA_J26100)-Pi(R6K)-constitutive promoter 2(P1)-Kis antitoxin). The strain further comprises a plasmid shown in FIG. 74B, except that the bla gene is replaced with the construct of FIG. 8A (FNR-ter/pbt-buk butyrate cassette). On other embodiments, other inducible or constitutive promoters are used.

[1587] SYN-1014 comprises a construct shown in FIG. 74D knocked into the thyA locus on the bacterial chromosome (medium copy RBS; thyA::constitutive prom1 (BBA_J26100)-Pi(R6K)-constitutive promoter 2(P1)-Kis antitoxin). The strain further comprises a plasmid shown in FIG. 74B, except that the bla gene is replaced with the construct of FIG. 8A (FNR-ter/pbt-buk butyrate cassette). On other embodiments, other inducible or constitutive promoters are used.

TABLE 96
Biosafety System Constructs and Sequence Components

| | | SEQ ID |
|---|---|---|
| Description | Sequence | NO |
| Biosafety Plasmid | ACTCTTCCTTTTTCAATATTATTGAAGCATTTATCAG | 352 |
| System | GGTTATTGTCTCATGAGCGGATACATATTTGAATGT | |
| Component—dap | ATTTAGAAAAATAAACAAATAGGGGAATTAAAAAA | |
| A | AAGCCCGCTCATTAGGCGGGCTACTACCTAGGCCG | |
| Biosafety Plasmid | CGGCCGCGCGAATTCGAGCTCGGTACCCGGGGATC | |
| System Vector | CTCTAGAGTCGACCTGCAGGCATGCAAGCTTGCGG | |
| sequences, | CCGCGTCGTGACTGGGAAAACCCTGGCGACTAGTC | |
| comprising dapA, | TTGGACTCCTGTTGATAGATCCAGTAATGACCTCAG | |
| Kid Toxin and | AACTCCATCTGGATTTGTTCAGAACGCTCGGTTGCC | |
| R6K minimal ori | GCCGGGCGTTTTTTATTGGTGAGAATCCAGGGGTCC | |
| and promoter | CCAATAATTACGATTTAAATCACAGCAAACACCAC | |
| elements driving | GTCGGCCCTATCAGCTGCGTGCTTTCTATGAGTCGT | |
| expression of these | TGCTGCATAACTTGACAATTAACATCCGGCTCGTAG | |
| components, as | GGTTTGTGGAGGGCCCAAGTTCACTTAAAAAGGAG | |
| shown in FIG. | ATCAACAATGAAAGCAATTTTCGTACTGAAACATCT | |
| 74A | TAATCATGCTGGGGAGGGTTTCTAATGTTCACGGGA | |
| | AGTATTGTCGCGATTGTTACTCCGATGGATGAAAAA | |
| | GGTAATGTCTGTCGGGCTAGCTTGAAAAAACTGATT | |
| | GATTATCATGTCGCCAGCGGTACTTCGGCGATCGTT | |
| | TCTGTTGGCACCACTGGCGAGTCCGCTACCTTAAAT | |
| | CATGACGAACATGCTGATGTGGTGATGATGACGCT | |
| | GGATCTGGCTGATGGGCGCATTCCGGTAATTGCCGG | |
| | GACCGGCGCTAACGCTACTGCGGAAGCCATTAGCC | |
| | TGACGCAGCGCTTCAATGACAGTGGTATCGTCGGCT | |
| | GCCTGACGGTAACCCCTTACTACAATCGTCCGTCGC | |
| | AAGAAGGTTTGTATCAGCATTTCAAAGCCATCGCTG | |
| | AGCATACTGACCTGCCGCAAATTCTGTATAATGTGC | |
| | CGTCCCGTACTGGCTGCGATCTGCTCCCGGAAACGG | |
| | TGGGCCGTCTGGCGAAAGTAAAAAATATTATCGGA | |
| | ATCAAAGAGGCAACAGGGAACTTAACGCGTGTAAA | |
| | CCAGATCAAAGAGCTGGTTTCAGATGATTTTGTTCT | |
| | GCTGAGCGGCGATGATGCGAGCGCGCTGGACTTCA | |
| | TGCAATTGGGCGGTCATGGGGTTATTTCCGTTACGG | |
| | CTAACGTCGCAGCGCGTGATATGGCCCAGATGTGC | |
| | AAACTGGCAGCAGAAGGGCATTTTGCCGAGGCACG | |
| | CGTTATTAATCAGCGTCTGATGCCATTACACAACAA | |
| | ACTATTTGTCGAACCCAATCCAATCCCGGTGAAATG | |
| | GGCATGTAAGGAACTGGGTCTTGTGGCGACCGATA | |
| | CGCTGCGCCTGCCAATGACACCAATCACCGACAGT | |
| | GGCCGTGAGACGGTCAGAGCGGCGCTTAAACATGC | |
| | CGGTTTGCTGTAAGACTTTTGTCAGGTTCCTACTGT | |
| | GACGACTACCACCGATAGACTGGAGTGTTGCTGCG | |
| | AAAAAACCCCGCCGAAGCGGGGTTTTTTGCGAGAA | |
| | GTCACCACGATTGTGCTTTACACGGAGTAGTCGGCA | |
| | GTTCCTTAAGTCAGAATAGTGGACAGGCGGCCAAG | |
| | AACTTCGTTCATGATAGTCTCCGGAACCCGTTCGAG | |
| | TCGTTTTCCGCCCCGTGCTTTCATATCAATTGTCCGG | |
| | GGTTGATCGCAACGTACAACACCTGTGGTACGTATG | |
| | CCAACACCATCCAACGACACCGCAAAGCCGGCAGT | |
| | GCGGGCAAAATTGCCTCCGCTGGTTACGGGCACAA | |
| | CAACAGGCAGGCGGGTCACGCGATTAAAGGCCGCC | |
| | GGTGTGACAATCAGCACCGGCCGCGTTCCCTGCTGC | |
| | TCATGACCTGCGGTAGGATCAAGCGAGACAAGCCA | |
| | GATTTCCCCTCTTTCCATCTAGTATAACTATTGTTTC | |
| | TCTAGTAACATTTATTGTACAACACGAGCCCATTTT | |
| | TGTCAAATAAATTTTAAATTATATCAACGTTAATAA | |
| | GACGTTGTCAATAAAATTATTTTGACAAAATTGGCC | |
| | GGCCGGCGCGCCGATCTGAAGATCAGCAGTTCAAC | |
| | CTGTTGATAGTACGTACTAAGCTCTCATGTTTCACG | |
| | TACTAAGCTCTCATGTTTAACGTACTAAGCTCTCAT | |
| | GTTTAACGAACTAAACCCTCATGGCTAACGTACTAA | |
| | GCTCTCATGGCTAACGTACTAAGCTCTCATGTTTCA | |
| | CGTACTAAGCTCTCATGTTTGAACAATAAAATTAAT | |
| | ATAAATCAGCAACTTAAATAGCCTCTAAGGTTTTAA | |
| | GTTTTATAAGAAAAAAAAGAATATATAAGGCTTTT | |
| | AAAGCCTTTAAGGTTTAACGGTTGTGGACAACAAG | |
| | CCAGGGATGTAACGCACTGAGAAGCCCTTAGAGCC | |
| | TCTCAAAGCAATTTTGAGTGACACAGGAACACTTA | |
| | ACGGCTGACATGGGGCGCGCCCAGCTGTCTAGGGC | |
| | GGCGGATTTGTCCTACTCAGGAGAGCGTTCACCGAC | |
| | AAACAACAGATAAAACGAAAGGCCCAGTCTTTCGA | |
| | CTGAGCCTTTCGTTTTATTTGATGCCT | |
| Biosafety Plasmid | ACTCTTCCTTTTTCAATATTATTGAAGCATTTATCAG | 353 |
| System | GGTTATTGTCTCATGAGCGGATACATATTTGAATGT | |
| | ATTTAGAAAAATAAACAAATAGGGGAATTAAAAAA | |
| Component— | AAGCCCGCTCATTAGGCGGGCTACTACCTAGGCCG | |
| ThyA | CGGCCGCGCGAATTCGAGCTCGGTACCCGGGGATC | |
| Biosafety Plasmid | CTCTAGAGTCGACCTGCAGGCATGCAAGCTTGCGG | |
| System Vector | CCGCGTCGTGACTGGGAAAACCCTGGCGACTAGTC | |
| sequences, | TTGGACTCCTGTTGATAGATCCAGTAATGACCTCAG | |
| comprising ThyA, | AACTCCATCTGGATTTGTTCAGAACGCTCGGTTGCC | |
| Kid Toxin and | GCCGGGCGTTTTTTATTGGTGAGAATCCAGGGGTCC | |
| R6K minimal ori, | CCAATAATTACGATTTAAATCACAGCAAACACCAC | |
| and promoter | GTCGGCCCTATCAGCTGCGTGCTTICTATGAGTCGT | |
| elements driving | TGCTGCATAACTTGACAATTAATCATCCGGCTCGTA | |
| expression of these | GGGTTTGTGGAGGGCCCAAGTTCACTTAAAAAGGA | |
| components, as | GATCAACAATGAAAGCAATTTTCGTACTGAAACAT | |
| shown in FIG. | CTTAATCATGCTGGGGAGGGTTTCTAATGAAACAGT | |
| 74B | ATTTAGAACTGATGCAAAAAGTGCTCGACGAAGGC | |
| | ACACAGAAAAACGACCGTACCGGAACCGGAACGCT | |
| | TTCCATTTTTGGTCATCAGATGCGTTTTAACCTGCA | |
| | AGATGGATTCCCGCTGGTGACAACTAAACGTTGCC | |
| | ACCTGCGTTCCATCATCCATGAACTGCTGTGGTTTC | |
| | TTCAGGGCGACACTAACATTGCTTATCTACACGAAA | |
| | ACAATGTCACCATCTGGGACGAATGGGCCGATGAA | |
| | AACGGCGACCTCGGGCCAGTGTATGGTAAACAGTG | |
| | GCGTGCCTGGCCAACGCCAGATGGTCGTCATATTGA | |
| | CCAGATCACTACGGTACTGAACCAGCTGAAAAACG | |
| | ACCCGGATTCGCGCCGCATTATTGTTTCAGCGTGGA | |
| | ACGTAGGCGAACTGGATAAAATGGCGCTGGCACCG | |
| | TGCCATGCATTCTTCCAGTTCTATGTGGCAGACGGC | |
| | AAACTCTCTTGCCAGCTTTATCAGCGCTCCTGTGAC | |
| | GTCTTCCTCGGCCTGCCGTTCAACATTGCCAGCTAC | |
| | GCGTTATTGGTGCATATGATGGCGCAGCAGTGCGAT | |
| | CTGGAAGTGGGTGATTTTGTCTGGACCGGTGGCGAC | |
| | ACGCATCTGTACAGCAACCATATGGATCAAACTCAT | |
| | CTGCAATTAAGCCGCGAACCGCGTCCGCTGCCGAA | |
| | GTTGATTATCAAACGTAAACCCGAATCCATCTTCGA | |
| | CTACCGTTTCGAAGACTTTGAGATTGAAGGCTACGA | |
| | TCCGCATCCGGGCATTAAAGCGCCGGTGGCTATCTA | |
| | AGACTTTTGTCAGGTTCCTACTGTGACGACTACCAC | |
| | CGATAGACTGGAGTGTTGCTGCGAAAAAACCCCGC | |
| | CGAAGCGGGGTTTTTTGCGAGAAGTCACCACGATT | |
| | GTGCTTTACACGGAGTAGTCGGCAGTTCCTTAAGTC | |
| | AGAATAGTGGACAGGCGGCCAAGAACTTCGTTCAT | |
| | GATAGTCTCCGGAACCCGTTCGAGTCGTTTTCCGCC | |
| | CCGTGCTTTCATATCAATTGTCCGGGGTTGATCGCA | |
| | ACGTACAACACCTGTGGTACGTATGCCAACACCATC | |
| | CAACGACACCGCAAAGCCGGCAGTGCGGGCAAAAT | |
| | TGCCTCCGCTGGTTACGGGCACAACAACAGGCAGG | |
| | CGGGTCACGCGATTAAAGGCCGCCGGTGTGACAAT | |
| | CAGCACCGGCCGCGTTCCCTGCTGCTCATGACCTGC | |
| | GGTAGGATCAAGCGAGACAAGCCAGATTTCCCCTC | |
| | TTTCCATCTAGTATAACTATTGTTTCTCTAGTAACAT | |
| | TTATTGTACAACACGAGCCCATTTTTGTCAAATAAA | |
| | TTTTAAATTATATCAACGTTAATAAGACGTTGTCAA | |
| | TAAAATTATTTTGACAAAATTGGCCGGCCGGCGCGC | |
| | CGATCTGAAGATCAGCAGTTCAACCTGTTGATAGTA | |
| | CGTACTAAGCTCTCATGTTTCACGTACTAAGCTCTC | |
| | ATGTTTAACGTACTAAGCTCTCATGTTTAACGAACT | |
| | AAACCCTCATGGCTAACGTACTAAGCTCTCATGGCT | |
| | AACGTACTAAGCTCTCATGTTTCACGTACTAAGCTC | |
| | TCATGTTTGAACAATAAAATTAATATAAATCAGCAA | |
| | CTTAAATAGCCTCTAAGGTTTTAAGTTTTATAAGAA | |
| | AAAAAAGAATATATAAGGCTTTTAAAGCCTTTAAG | |
| | GTTTAACGGTTGTGGACAACAAGCCAGGGATGTAA | |
| | CGCACTGAGAAGCCCTTAGAGCCTCTCAAAGCAAT | |
| | TTTGAGTGACACAGGAACACTTAACGGCTGACATG | |
| | GGGCGCGCCCAGCTGTCTAGGGCGGCGGATTTGTC | |
| | CTACTCAGGAGAGCGTTCACCGACAAACAACAGAT | |
| | AAAACGAAAGGCCCAGTCTTTCGACTGAGCCTTTCG | |
| | TTTTATTTGATGCCT | |
| Kid toxin (reverse | TTAAGTCAGAATAGTGGACAGGCGGCCAAGAACTT | 354 |
| orientation) | CGTTCATGATAGTCTCCGGAACCCGTTCGAGTCGTT | |
| | TTCCGCCCCGTGCTTTCATATCAATTGTCCGGGGTT | |
| | GATCGCAACGTACAACACCTGTGGTACGTATGCCA | |
| | ACACCATCCAACGACACCGCAAAGCCGGCAGTGCG | |
| | GGCAAAATTGCCTCCGCTGGTTACGGGCACAACAA | |
| | CAGGCAGGCGGGTCACGCGATTAAAGGCCGCCGGT | |
| | GTGACAATCAGCACCGGCCGCGTTCCCTGCTGCTCA | |
| | TGACCTGCGGTAGGATCAAGCGAGACAAGCCAGAT | |
| | TTCCCCTCTTTCCAT | |
| dapA | ATGTTCACGGGAAGTATTGTCGCGATTGTTACTCCG | 355 |
| | ATGGATGAAAAAGGTAATGTCTGTCGGGCTAGCTT | |
| | GAAAAAACTGATTGATTATCATGTCGCCAGCGGTA | |
| | CTTCGGCGATCGTTTCTGTTGGCACCACTGGCGAGT | |
| | CCGCTACCTTAAATCATGACGAACATGCTGATGTGG | |
| | TGATGATGACGCTGGATCTGGCTGATGGGCGCATTC | |
| | CGGTAATTGCCGGGACCGGCGCTAACGCTACTGCG | |
| | GAAGCCATTAGCCTGACGCAGCGCTTCAATGACAG | |
| | TGGTATCGTCGGCTGCCTGACGGTAACCCCTTACTA | |
| | CAATCGTCCGTCGCAAGAAGGTTTGTATCAGCATTT | |
| | CAAAGCCATCGCTGAGCATACTGACCTGCCGCAAA | |
| | TTCTGTATAATGTGCCGTCCCGTACTGGCTGCGATC | |
| | TGCTCCCGGAAACGGTGGGCCGTCTGGCGAAAGTA | |
| | AAAAATATTATCGGAATCAAAGAGGCAACAGGGAA | |
| | CTTAACGCGTGTAAACCAGATCAAAGAGCTGGTTTC | |
| | AGATGATTTTGTTCTGCTGAGCGGCGATGATGCGAG | |
| | CGCGCTGGACTTCATGCAATTGGGCGGTCATGGGGT | |
| | TATTTCCGTTACGGCTAACGTCGCAGCGCGTGATAT | |
| | GGCCCAGATGTGCAAACTGGCAGCAGAAGGGCATT | |
| | TTGCCGAGGCACGCGTTATTAATCAGCGTCTGATGC | |
| | CATTACACAACAAACTATTTGTCGAACCCAATCCAA | |
| | TCCCGGTGAAATGGGCATGTAAGGAACTGGGTCTT | |
| | GTGGCGACCGATACGCTGCGCCTGCCAATGACACC | |
| | AATCACCGACAGTGGCCGTGAGACGGTCAGAGCGG | |
| | CGCTTAAACATGCCGGTTTGCTGTAA | |
| thyA | ATGAAACAGTATTTAGAACTGATGCAAAAAGTGCT | 356 |
| | CGACGAAGGCACACAGAAAAACGACCGTACCGGA | |
| | ACCGGAACGCTTTCCATTTTTGGTCATCAGATGCGT | |
| | TTTAACCTGCAAGATGGATTCCCGCTGGTGACAACT | |
| | AAACGTTGCCACCTGCGTTCCATCATCCATGAACTG | |
| | CTGTGGTTTCTTCAGGGCGACACTAACATTGCTTAT | |
| | CTACACGAAAACAATGTCACCATCTGGGACGAATG | |
| | GGCCGATGAAAACGGCGACCTCGGGCCAGTGTATG | |
| | GTAAACAGTGGCGTGCCTGGCCAACGCCAGATGGT | |
| | CGTCATATTGACCAGATCACTACGGTACTGAACCAG | |
| | CTGAAAAACGACCCGGATTCGCGCCGCATTATTGTT | |
| | TCAGCGTGGAACGTAGGCGAACTGGATAAAATGGC | |
| | GCTGGCACCGTGCCATGCATTCTTCCAGTTCTATGT | |
| | GGCAGACGGCAAACTCTCTTGCCAGCTTTATCAGCG | |
| | CTCCTGTGACGTCTTCCTCGGCCTGCCGTTCAACAT | |
| | TGCCAGCTACGCGTTATTGGTGCATATGATGGCGCA | |
| | GCAGTGCGATCTGGAAGTGGGTGATTTTGTCTGGAC | |
| | CGGTGGCGACACGCATCTGTACAGCAACCATATGG | |
| | ATCAAACTCATCTGCAATTAAGCCGCGAACCGCGTC | |
| | CGCTGCCGAAGTTGATTATCAAACGTAAACCCGAA | |
| | TCCATCTTCGACTACCGTTTCGAAGACTTTGAGATT | |
| | GAAGGCTACGATCCGCATCCGGGCATTAAAGCGCC | |
| | GGTGGCTATCTAA | |
| Kid toxin | MERGEIWLVSLDPTAGHEQQGTRPVLIVTPAAFNRVT | 357 |
| polypeptide | RLPVVVPVTSGGNFARTAGFAVSLDGVGIRTTGVVRC | |
| | DQPRTIDMKARGGKRLERVPETIMNEVLGRLSTILT* | |
| dapA polypeptide | MFTGSIVAIVTPMDEKGNVCRASLKKLIDYHVASGTS | 358 |
| | AIVSVGTTGESATLNHDEHADVVMMTLDLADGRIPVI | |
| | AGTGANATAEAISLTQRFNDSGIVGCLTVTPYYNRPS | |
| | QEGLYQHFKAIAEHTDLPQILYNVPSRTGCDLLPETVG | |
| | RLAKVKNIIGIKEATGNLTRVNQIKELVSDDFVLLSGD | |
| | DASALDFMQLGGHGVISVTANVAARDMAQMCKLAA | |
| | EGHFAEARVINQRLMPLHNKLFVEPNPIPVKWACKEL | |
| | GLVATDTLRLPMTPITDSGRETVRAALKHAGLL | |
| ThyA polypeptide | MKQYLELMQKVLDEGTQKNDRTGTGTLSIFGHQMRF | 359 |
| | NLQDGFPLVTTKRCHLRSIIHELLWFLQGDTNIAYLHE | |
| | NNVTIWDEWADENGDLGPVYGKQWRAWPTPDGRHI | |
| | DQITTVLNQLKNDPDSRRIIVSAWNVGELDKMALAPC | |
| | HAFFQFYVADGKLSCQLYQRSCDVFLGLPFNIASYAL | |
| | LVHMMAQQCDLEVGDFVWTGGDTHLYSNHMDQTH | |
| | LQLSREPRPLPKLIIKRKPESIFDYRFEDFEIEGYDPHPG | |
| | IKAPVAI* | |

TABLE 97
Chromosomally Inserted Biosafety System Constructs

| | | SEQ |
|---|---|---|
| | | ID |
| Description | Sequence | NO |
| Biosafety | TTGACGGCTAGCTCAGTCCTAGGTACAGTGCTAGCGGAT | 360 |
| Chromosomal | CTGCTGGAACAGGTGGTGAGACTCAAGGTCATGATGGA | |
| Construct—low | CGTGAACAAAAAAACGAAAATTCGCCACCGAAACGAGC | |
| copy Rep (Pi) | TAAATCACACCCTGGCTCAACTTCCTTTGCCCGCAAAGC | |
| and Kis antitoxin | GAGTGATGTATATGGCGCTTGCTCCCATTGATAGCAAAG | |
| (as shown in | AACCTCTTGAACGAGGGCGAGTTTTCAAAATTAGGGCTG | |
| FIG. 74C) | AAGACCTTGCAGCGCTCGCCAAAATCACCCCATCGCTTG | |
| | CTTATCGACAATTAAAAGAGGGTGGTAAATTACTTGGTG | |
| | CCAGCAAAATTTCGCTAAGAGGGGATGATATCATTGCTT | |
| | TAGCTAAAGAGCTTAACCTGCTCTTTACTGCTAAAAACT | |
| | CCCCTGAAGAGTTAGACCTTAACATTATTGAGTGGATAG | |
| | CTTATTCAAATGATGAAGGATACTTGTCTTTAAAATTCA | |
| | CCAGAACCATAGAACCATATATCTCTAGCCTTATTGGGA | |
| | AAAAAAATAAATTCACAACGCAATTGTTAACGGCAAGC | |
| | TTACGCTTAAGTAGCCAGTATTCATCTTCTCTTTATCAAC | |
| | TTATCAGGAAGCATTACTCTAATTTTAAGAAGAAAAATT | |
| | ATTTTATTATTTCCGTTGATGAGTTAAAGGAAGAGTTAA | |
| | TAGCTTATACTTTTGATAAAGATGGAAATATTGAGTACA | |
| | AATACCCTGACTTTCCTATTTTTAAAAGGGATGTGTTAA | |
| | ATAAAGCCATTGCTGAAATTAAAAAGAAAACAGAAATA | |
| | TCGTTTGTTGGCTTCACTGTTCATGAAAAAGAAGGAAGA | |
| | AAAATTAGTAAGCTGAAGTTCGAATTTGTCGTTGATGAA | |
| | GATGAATTTTCTGGCGATAAAGATGATGAAGCTTTTTTT | |
| | ATGAATTTATCTGAAGCTGATGCAGCTTTTCTCAAGGTA | |
| | TTTGATGAAACCGTACCTCCCAAAAAAGCTAAGGGGTGA | |
| | GGATCTCCAGGCATCAAATAAAACGAAAGGCTCAGTCG | |
| | AAAGACTGGGCCTTTCGTTTTATCTGTTGTTTGTCGGTGA | |
| | ACGCTCTCTACTAGAGTCACACTGGCTCACCTTCGGGTG | |
| | GGCCTTTCTGCGTTTATACCCGGGAAAAAGAGTATTGAC | |
| | TtaaagtctaacctataggTATAATGTGTGGAGACCAGAGGTAAGG | |
| | AGGTAACAACCATGCGAGTGTTGAAGAAACATCTTAATC | |
| | ATGCTAAGGAGGTTTTCTAATGCATACCACCCGACTGAA | |
| | GAGGGTTGGCGGCTCAGTTATGCTGACCGTCCCACCGGC | |
| | ACTGCTGAATGCGCTGTCTCTGGGCACAGATAATGAAGT | |
| | TGGCATGGTCATTGATAATGGCCGGCTGATTGTTGAGCC | |
| | GTACAGACGCCCGCAATATTCACTGGCTGAGCTACTGGC | |
| | ACAGTGTGATCCGAATGCTGAAATATCAGCTGAAGAAC | |
| | GAGAATGGCTGGATGCACCGGCGACTGGTCAGGAGGAA | |
| | ATCTGA | |
| Biosafety | TTGACGGCTAGCTCAGTCCTAGGTACAGTGCTAGCGGAT | 361 |
| Chromosomal | CTTCCGGAAGACTAGGTGAGACTCAAGGTCATGATGGAC | |
| Construct— | GTGAACAAAAAAACGAAAATTCGCCACCGAAACGAGCT | |
| medium copy | AAATCACACCCTGGCTCAACTTCCTTTGCCCGCAAAGCG | |
| Rep (Pi) and Kis | AGTGATGTATATGGCGCTTGCTCCCATTGATAGCAAAGA | |
| antitoxin (as | ACCTCTTGAACGAGGGCGAGTTTTCAAAATTAGGGCTGA | |
| shown in FIG. | AGACCTTGCAGCGCTCGCCAAAATCACCCCATCGCTTGC | |
| 74D) | TTATCGACAATTAAAAGAGGGTGGTAAATTACTTGGTGC | |
| | CAGCAAAATTTCGCTAAGAGGGGATGATATCATTGCTTT | |
| | AGCTAAAGAGCTTAACCTGCTCTTTACTGCTAAAAACTC | |
| | CCCTGAAGAGTTAGACCTTAACATTATTGAGTGGATAGC | |
| | TTATTCAAATGATGAAGGATACTTGTCTTTAAAATTCAC | |
| | CAGAACCATAGAACCATATATCTCTAGCCTTATTGGGAA | |
| | AAAAAATAAATTCACAACGCAATTGTTAACGGCAAGCTT | |
| | ACGCTTAAGTAGCCAGTATTCATCTTCTCTTTATCAACTT | |
| | ATCAGGAAGCATTACTCTAATTTTAAGAAGAAAAATTAT | |
| | TTTATTATTTCCGTTGATGAGTTAAAGGAAGAGTTAATA | |
| | GCTTATACTTTTGATAAAGATGGAAATATTGAGTACAAA | |
| | TACCCTGACTTTCCTATTTTTAAAAGGGATGTGITAAATA | |
| | AAGCCATTGCTGAAATTAAAAAGAAAACAGAAATATCG | |
| | TTTGTTGGCTTCACTGTTCATGAAAAAGAAGGAAGAAAA | |
| | ATTAGTAAGCTGAAGTTCGAATTTGTCGTTGATGAAGAT | |
| | GAATTTTCTGGCGATAAAGATGATGAAGCTTTTTTTATG | |
| | AATTTATCTGAAGCTGATGCAGCTTTTCTCAAGGTATTTG | |
| | ATGAAACCGTACCTCCCAAAAAAGCTAAGGGGTGAGGA | |
| | TCTCCAGGCATCAAATAAAACGAAAGGCTCAGTCGAAA | |
| | GACTGGGCCTTTCGTTTTATCTGTTGTTTGTCGGTGAACG | |
| | CTCTCTACTAGAGTCACACTGGCTCACCTTCGGGTGGGC | |
| | CTTTCTGCGTTTATACCCGGGAAAAAGAGTATTGACTtaaa | |
| | gtctaacctataggTATAATGTGTGGAGACCAGAGGTAAGGAGG | |
| | TAACAACCATGCGAGTGTTGAAGAAACATCTTAATCATG | |
| | CTAAGGAGGTTTTCTAATGCATACCACCCGACTGAAGAG | |
| | GGTTGGCGGCTCAGTTATGCTGACCGTCCCACCGGCACT | |
| | GCTGAATGCGCTGTCTCTGGGCACAGATAATGAAGTTGG | |
| | CATGGTCATTGATAATGGCCGGCTGATTGTTGAGCCGTA | |
| | CAGACGCCCGCAATATTCACTGGCTGAGCTACTGGCACA | |
| | GTGTGATCCGAATGCTGAAATATCAGCTGAAGAACGAG | |
| | AATGGCTGGATGCACCGGCGACTGGTCAGGAGGAAATC | |
| | TGA | |
| Rep (Pi) | TGAGACTCAAGGTCATGATGGACGTGAACAAAAAAACG | 362 |
| | AAAATTCGCCACCGAAACGAGCTAAATCACACCCTGGCT | |
| | CAACTTCCTTTGCCCGCAAAGCGAGTGATGTATATGGCG | |
| | CTTGCTCCCATTGATAGCAAAGAACCTCTTGAACGAGGG | |
| | CGAGTTTTCAAAATTAGGGCTGAAGACCTTGCAGCGCTC | |
| | GCCAAAATCACCCCATCGCTTGCTTATCGACAATTAAAA | |
| | GAGGGTGGTAAATTACTTGGTGCCAGCAAAATTTCGCTA | |
| | AGAGGGGATGATATCATTGCTTTAGCTAAAGAGCTTAAC | |
| | CTGCTCTTTACTGCTAAAAACTCCCCTGAAGAGTTAGAC | |
| | CTTAACATTATTGAGTGGATAGCTTATTCAAATGATGAA | |
| | GGATACTTGTCTTTAAAATTCACCAGAACCATAGAACCA | |
| | TATATCTCTAGCCTTATTGGGAAAAAAAATAAATTCACA | |
| | ACGCAATTGTTAACGGCAAGCTTACGCTTAAGTAGCCAG | |
| | TATTCATCTTCTCTTTATCAACTTATCAGGAAGCATTACT | |
| | CTAATTTTAAGAAGAAAAATTATTTTATTATTTCCGTTGA | |
| | TGAGTTAAAGGAAGAGTTAATAGCTTATACTTTTGATAA | |
| | AGATGGAAATATTGAGTACAAATACCCTGACTTTCCTAT | |
| | TTTTAAAAGGGATGTGTTAAATAAAGCCATTGCTGAAAT | |
| | TAAAAAGAAAACAGAAATATCGTTTGTTGGCTTCACTGT | |
| | TCATGAAAAAGAAGGAAGAAAAATTAGTAAGCTGAAGT | |
| | TCGAATTTGTCGTTGATGAAGATGAATTTTCTGGCGATA | |
| | AAGATGATGAAGCTTTTTTTATGAATTTATCTGAAGCTG | |
| | ATGCAGCTTTTCTCAAGGTATTTGATGAAACCGTACCTC | |
| | CCAAAAAAGCTAAGGGGTGA | |
| Kis antitoxin | CATACCACCCGACTGAAGAGGGTTGGCGGCTCAGTTATG | 363 |
| | CTGACCGTCCCACCGGCACTGCTGAATGCGCTGTCTCTG | |
| | GGCACAGATAATGAAGTTGGCATGGTCATTGATAATGGC | |
| | CGGCTGATTGTTGAGCCGTACAGACGCCCGCAATATTCA | |
| | CTGGCTGAGCTACTGGCACAGTGTGATCCGAATGCTGAA | |
| | ATATCAGCTGAAGAACGAGAATGGCTGGATGCACCGGC | |
| | GACTGGTCAGGAGGAAATCTGA | |
| RBS (low copy) | GCTGGAACAGGTGG | 364 |
| RBS (medium | TCCGGAAGACTAGG | 365 |
| copy) | | |

### Example 67

TABLE 98
Other Sequences of interest

| | |
|---|---|
| Wild-type clbA | caaatatcacataatcttaacatatcaataaacacagtaaagtttcatgtgaaaaacat |
| (SEQ ID NO: 350) | caaacataaaatacaagctcggaatacgaatcacgctatacacattgctaacagga |
| | atgagattatctaaatgaggattgatatattaattggacatactagtttttttcatcaaac |
| | cagtagagataacttecttcactatctcaatgaggaagaaataaaacgctatgatca |
| | gtttcattttgtgagtgataaagaactctatattttaagccgtatcctgctcaaaacagc |
| | actaaaaagatatcaacctgatgtctcattacaatcatggcaatttagtacgtgcaaat |
| | atggcaaaccatttatagtttttcctcagttggcaaaaaagattttttttaacctttcccat |
| | actatagatacagtagccgttgctattagttctcactgcgagcttggtgtcgatattga |
| | acaaataagagatttagacaactcttatctgaatatcagtcagcatttttttactccaca |
| | ggaagctactaacatagtttcacttcctcgttatgaaggtcaattacttttttggaaaat |
| | gtggacgctcaaagaagcttacatcaaatatcgaggtaaaggcctatctttaggact |
| | ggattgtattgaatttcatttaacaaataaaaaactaacttcaaaatatagaggttcacc |
| | tgtttatttctctcaatggaaaatatgtaactcatttctcgcattagcctctccactcatca |
| | cccctaaaataactattgagctatttcctatgcagtcccaactttatcaccacgactatc |
| | agctaattcattcgtcaaatgggcagaattgaatcgccacggataatctagacacttc |
| | tgagccgtcgataatattgattttcatattccgtcggtggtgtaagtatcccgcataatc |
| | gtgccattcacatttag |
| clbA knock-out | ggatggggggaaacatggataagttcaaagaaaaaaacccgttatctctgcgtgaaa |
| (SEQ ID NO: 351) | gacaagtattgcgcatgctggcacaaggtgatgagtactctcaaatatcacataatctt |
| | aacatatcaataaacacagtaaagtttcatgtgaaaaacatcaaacataaaatacaagc |
| | tcggaatacgaatcacgctatacacattgctaacaggaatgagattatctaaatgagga |
| | ttgaTGTGTAGGCTGGAGCTGCTTCGAAGTTCCTATAC |
| | TTTCTAGAGAATAGGAACTTCGGAATAGGAACTTCG |
| | GAATAGGAACTAAGGAGGATATTCATATGtcgtcaaatggg |
| | cagaattgaatcgccacggataatctagacacttctgagccgtcgataatattgattttc |
| | atattccgtcggtgg |

1. A bacterium comprising at least one gene or gene cassette encoding one or more non-native biosynthetic pathways for producing butyrate, wherein the bacterium comprises an endogenous pta gene that is mutated or deleted to decrease the activity and/or expression of pta, and wherein the at least one gene or gene cassette for producing butyrate is operably linked to a directly or indirectly inducible promoter that is not associated with the gene or gene cassette in nature.

2. The bacterium of claim 1, wherein the bacterium comprises an endogenous adhE gene which is knocked down via mutation or deletion.

3. The bacterium of claim 1, wherein the bacterium comprises an endogenous frd gene which is knocked down via mutation or deletion.

4. The bacterium of claim 1, wherein the bacterium comprises an endogenous ldhA gene which is knocked down via mutation or deletion.

5. The bacterium of claim 1, wherein the at least one gene cassette comprises ter, thiA1, hbd, crt2, pbt, and buk genes.

6. The bacterium of claim 1, wherein the at least one gene cassette comprises ter, thiA1, hbd, crt2, and tesb genes.

7. A bacterium comprising a biosynthetic pathway for producing acetate, wherein the bacterium comprises an endogenous adhE gene that is mutated or deleted to decrease the activity and/or expression of adhE.

8. A bacterium comprising a biosynthetic pathway for producing acetate, wherein the bacterium comprises an endogenous frd gene that is mutated or deleted to decrease the activity and/or expression of frd.

9. A bacterium comprising a biosynthetic pathway for producing acetate, wherein the bacterium comprises an endogenous ldhA gene that is mutated or deleted to decrease the activity and/or expression of ldhA.

10. The bacterium of claim 7, wherein the bacterium comprises an endogenous frd gene that is mutated or deleted to decrease the activity and/or expression of frd.

11. The bacterium of claim 7, wherein the bacterium comprises an endogenous ldhA gene that is mutated or deleted to decrease the activity and/or expression of ldhA.

12. The bacterium of claim 7, wherein the bacterium comprises an endogenous ldhA gene and an endogenous frd gene, wherein the ldhA gene is mutated or deleted to decrease activity and/or expression of ldhA and wherein the frd gene is mutated or deleted to decrease activity and/or expression of frd.

13. The bacterium of claim 7, wherein the biosynthetic pathway for producing acetate is a native biosynthetic pathway endogenous to the bacterium.

14. The bacterium of claim 7, wherein the biosynthetic pathway for producing acetate is a non-native biosynthetic pathway.

15. The bacterium of claim 14, wherein the bacterium comprises at least one gene or gene cassette encoding the non-native biosynthetic pathway for producing acetate, wherein the at least one gene or gene cassette for producing acetate is operably linked to a directly or indirectly inducible promoter that is not associated with the gene or gene cassette in nature

16. The bacterium of claim 1, wherein the promoter is induced by exogenous environmental conditions found in a mammalian gut.

17. The bacterium of claim 16, wherein the promoter is induced under low-oxygen or anaerobic conditions.

18. The bacterium of claim 17, wherein the promoter is a FNR-responsive promoter, an ANR-responsive promoter, or a DNR-responsive promoter.

19. The bacterium of claim 18, wherein the promoter is a FNR-responsive promoter.

20. The bacterium of claim 1, wherein the promoter is induced by the presence of reactive nitrogen species.

21. The bacterium of claim 20, wherein the promoter is a NsrR-responsive promoter, NorR-responsive promoter, or a DNR-responsive promoter.

22. The bacterium of claim 1, wherein the promoter is induced by the presence of reactive oxygen species.

23. The bacterium of claim 22, wherein the promoter is a OxyR-responsive promoter, PerR-responsive promoter, OhrR-responsive promoter, SoxR-responsive promoter, or a RosR-responsive promoter.

24. The bacterium of claim 1, wherein the gene and/or gene cassette is located on a chromosome in the bacterium.

25. The bacterium of claim 1, wherein the at least one gene and/or gene cassette is located on a plasmid in the bacterium.

26. The bacterium of claim 1, wherein the bacterium is a probiotic bacterium.

27. The bacterium of claim 26, wherein the bacterium is selected from the group consisting of Bacteroides, Bifidobacterium, Clostridium, Escherichia, Lactobacillus, and Lactococcus.

28. The bacterium of claim 27, wherein the bacterium is Escherichia coli strain Nissle.

29. The bacterium of claim 1, wherein the bacterium is an auxotroph in a gene that is complemented when the bacterium is present in a mammalian gut.

30. The bacterium of claim 29, wherein the bacterium is an auxotroph in diaminopimelic acid or an enzyme in the thymine biosynthetic pathway.

31. A pharmaceutically acceptable composition comprising the bacterium of claim 1, and a pharmaceutically acceptable carrier.

32. The composition of claim 31 formulated for oral or rectal administration.

33. A method of treating or preventing an autoimmune disorder, comprising the step of administering to a patient in need thereof, the composition of claim 31.

34. A method of treating a disease or condition associated with gut inflammation and/or compromised gut barrier function comprising the step of administering to a patient in need thereof, the composition of claim 31.

35. The method of claim 33, wherein the autoimmune disorder is selected from the group consisting of acute disseminated encephalomyelitis (ADEM), acute necrotizing hemorrhagic leukoencephalitis, Addison's disease, agammaglobulinemia, alopecia areata, amyloidosis, ankylosing spondylitis, anti-GBM/anti-TBM nephritis, antiphospholipid syndrome (APS), autoimmune angioedema, autoimmune aplastic anemia, autoimmune dysautonomia, autoimmune hemolytic anemia, autoimmune hepatitis, autoimmune hyperlipidemia, autoimmune immunodeficiency, autoimmune inner ear disease (AIED), autoimmune myocarditis, autoimmune oophoritis, autoimmune pancreatitis, autoimmune retinopathy, autoimmune thrombocytopenic purpura (ATP), autoimmune thyroid disease, autoimmune urticarial, Axonal & neuronal neuropathies, Balo disease, Behcet's disease, Bullous pemphigoid, Cardiomyopathy, Castleman disease, Celiac disease, Chagas disease, Chronic inflammatory demyelinating polyneuropathy (CIDP), Chronic recurrent multifocal ostomyelitis (CRMO), Churg-Strauss syndrome, Cicatricial pemphigoid/benign mucosal pemphigoid, Crohn's disease, Cogan syndrome, Cold agglutinin disease, Congenital heart block, Coxsackie myocarditis, CREST disease, Essential mixed cryoglobulinemia, Demyelinating neuropathies, Dermatitis herpetiformis, Dermatomyositis, Devic's disease (neuromyelitis optica), Discoid lupus, Dressler's syndrome, Endometriosis, Eosinophilic esophagitis, Eosinophilic fasciitis, Erythema nodosum, Experimental allergic encephalomyelitis, Evans syndrome, Fibrosing alveolitis, Giant cell arteritis (temporal arteritis), Giant cell myocarditis, Glomerulonephritis, Goodpasture's syndrome, Granulomatosis with Polyangiitis (GPA), Graves' disease, Guillain-Barre syndrome, Hashimoto's encephalitis, Hashimoto's thyroiditis, Hemolytic anemia, Henoch-Schonlein purpura, Herpes gestationis, Hypogammaglobulinemia, Idiopathic thrombocytopenic purpura (ITP), IgA nephropathy, IgG4-related sclerosing disease, Immunoregulatory lipoproteins, Inclusion body myositis, Interstitial cystitis, Juvenile arthritis, Juvenile idiopathic arthritis, Juvenile myositis, Kawasaki syndrome, Lambert-Eaton syndrome, Leukocytoclastic vasculitis, Lichen planus, Lichen sclerosus, Ligneous conjunctivitis, Linear IgA disease (LAD), Lupus (Systemic Lupus Erythematosus), chronic Lyme disease, Meniere's disease, Microscopic polyangiitis, Mixed connective tissue disease (MCTD), Mooren's ulcer, Mucha-Habermann disease, Multiple sclerosis, Myasthenia gravis, Myositis, Narcolepsy, Neuromyelitis optica (Devic's), Neutropenia, Ocular cicatricial pemphigoid, Optic neuritis, Palindromic rheumatism, PANDAS (Pediatric autoimmune Neuropsychiatric Disorders Associated with Streptococcus), Paraneoplastic cerebellar degeneration, Paroxysmal nocturnal hemoglobinuria (PNH), Parry Romberg syndrome, Parsonnage-Turner syndrome, Pars planitis (peripheral uveitis), Pemphigus, Peripheral neuropathy, Perivenous encephalomyelitis, Pernicious anemia, POEMS syndrome, Polyarteritis nodosa, Type I, II, & III autoimmune polyglandular syndromes, Polymyalgia rheumatic, Polymyositis, Postmyocardial infarction syndrome, Postpericardiotomy syndrome, Progesterone dermatitis, Primary biliary cirrhosis, Primary sclerosing cholangitis, Psoriasis, Psoriatic arthritis, Idiopathic pulmonary fibrosis, Pyoderma gangrenosum, Pure red cell aplasia, Raynauds phenomenon, reactive arthritis, reflex sympathetic dystrophy, Reiter's syndrome, relapsing polychondritis, restless legs syndrome, retroperitoneal fibrosis, rheumatic fever, rheumatoid arthritis, sarcoidosis, Schmidt syndrome, scleritis, scleroderma, Sjogren's syndrome, sperm & testicular autoimmunity, stiff person syndrome, subacute bacterial endocarditis (SBE), Susac's syndrome, sympathetic ophthalmia, Takayasu's arteritis, temporal arteritis/giant cell arteritis, thrombocytopenic purpura (TTP), Tolosa-Hunt syndrome, transverse myelitis, type 1 diabetes, asthma, ulcerative colitis, undifferentiated connective tissue disease (UCTD), uveitis, vasculitis, vesiculobullous dermatosis, vitiligo, and Wegener's granulomatosis.

36. The method of claim 35, wherein the autoimmune disorder is selected from the group consisting of type 1 diabetes, lupus, rheumatoid arthritis, ulcerative colitis, juvenile arthritis, psoriasis, psoriatic arthritis, celiac disease, and ankylosing spondylitis.

37. The method of claim 34, wherein the disease or condition is selected from an inflammatory bowel disease, including Crohn's disease and ulcerative colitis, and a diarrheal disease.

38. The bacterium of claim 1, wherein the promoter is a thermoregulated promoter.

39. The bacterium of claim 38, wherein the thermoregulated promoter is induced at a temperature between 37° C. and 42° C.

40. The bacterium of claim 38, wherein the thermoregulated promoter is a lambda CI inducible promoter.

41. The bacterium of claim 38, further comprising one or more gene(s) encoding a temperature sensitive CI repressor mutant.

42. The bacterium of claim 41, wherein the temperature sensitive CI repressor mutant is CI857.

The application's sequence listing, which the Patent Office published only in electronic form, follows.

SEQUENCE LISTING (1514 sequences)

SEQ ID NO: 1 - DNA, 1137 bp, Artificial Sequence
  Synthetic
atggatttaaattctaaaaaatatcagatgcttaaagagctatatgtaagcttcgctgaaaatgaagttaaacctttagcaacagaacttgatgaagaagaaagatttccttatgaaacagtggaaaaaatggcaaaagcaggaatgatgggtataccatatccaaaagaatatggtggagaaggtggagacactgtaggatatataatggcagttgaagaattgtctagagtttgtggtactacaggagttatattatcagctcatacatctcttggctcatggcctatatatcaatatggtaatgaagaacaaaaacaaaaattcttaagaccactagcaagtggagaaaaattaggagcatttggtcttactgagcctaatgctggtacagatgcgtctggccaacaaacaactgctgttttagacggggatgaatacatacttaatggctcaaaaatatttataacaaacgcaatagctggtgacatatatgtagtaatggcaatgactgataaatctaaggggaacaaaggaatatcagcatttatagttgaaaaaggaactcctgggtttagctttggagttaaagaaaagaaaatgggtataagaggttcagctacgagtgaattaatatttgaggattgcagaatacctaaagaaaatttacttggaaaagaaggtcaaggatttaagatagcaatgtctactcttgatggtggtagaattggtatagctgcacaagctttaggtttagcacaaggtgctcttgatgaaactgttaaatatgtaaaagaaagagtacaatttggtagaccattatcaaaattccaaaatacacaattccaattagctgatatggaagttaaggtacaagcggctagacaccttgtatatcaagcagctataaataaagacttaggaaaaccttatggagtagaagcagcaatggcaaaattatttgcagctgaaacagctatggaagttactacaaaagctgtacaacttcatggaggatatggatacactcgtgactatccagtagaaagaatgatgagagatgctaagataactgaaatatatgaaggaactagtgaagttcaaagaatggttatttcaggaaaactattaaaatag

SEQ ID NO: 2 - DNA, 783 bp, Artificial Sequence
  Synthetic
atgaatatagtcgtttgtataaaacaagttccagatacaacagaagttaaactagatcctaatacaggtactttaattagagatggagtaccaagtataataaaccctgatgataaagcaggtttagaagaagctataaaattaaaagaagaaatgggtgctcatgtaactgttataacaatgggacctcctcaagcagatatggctttaaaagaagctttagcaatgggtgcagatagaggtatattattaacagatagagcatttgcgggtgctgatacttgggcaacttcatcagcattagcaggagcattaaaaaatatagattttgatattataatagctggaagacaggcgatagatggagatactgcacaagttggacctcaaatagctgaacatttaaatcttccatcaataacatatgctgaagaaataaaaactgaaggtgaatatgtattagtaaaaagacaatttgaagattgttgccatgacttaaaagttaaaatgccatgccttataacaactcttaaagatatgaacacaccaagatacatgaaagttggaagaatatatgatgctttcgaaaatgatgtagtagaaacatggactgtaaaagatatagaagttgacccttctaatttaggtcttaaaggttctccaactagtgtatttaaatcatttacaaaatcagttaaaccagctggtacaatatacaatgaagatgcgaaaacatcagctggaattatcatagataaattaaaagagaagtatatcatataa

SEQ ID NO: 3 - DNA, 1011 bp, Artificial Sequence
  Synthetic
atgggtaacgttttagtagtaatagaacaaagagaaaatgtaattcaaactgtttctttagaattactaggaaaggctacagaaatagcaaaagattatgatacaaaagtttctgcattacttttaggtagtaaggtagaaggtttaatagatacattagcacactatggtgcagatgaggtaatagtagtagatgatgaagctttagcagtgtatacaactgaaccatatacaaaagcagcttatgaagcaataaaagcagctgaccctatagttgtattatttggtgcaacttcaataggtagagatttagcgcctagagtttctgctagaatacatacaggtcttactgctgactgtacaggtcttgcagtagctgaagatacaaaattattattaatgacaagacctgcctttggtggaaatataatggcaacaatagtttgtaaagatttcagacctcaaatgtctacagttagaccaggggttatgaagaaaaatgaacctgatgaaactaaagaagctgtaattaaccgtttcaaggtagaatttaatgatgctgataaattagttcaagttgtacaagtaataaaagaagctaaaaaacaagttaaaatagaagatgctaagatattagtttctgctggacgtggaatgggtggaaaagaaaacttagacatactttatgaattagctgaaattataggtggagaagtttctggttctcgtgccactatagatgcaggttggttagataaagcaagacaagttggtcaaactggtaaaactgtaagaccagacctttatatagcatgtggtatatctggagcaatacaacatatagctggtatggaagatgctgagtttatagttgctataaataaaaatccagaagctccaatatttaaatatgctgatgttggtatagttggagatgttcataaagtgcttccagaacttatcagtcagttaagtgttgcaaaagaaaaaggtgaagttttagctaactaa

SEQ ID NO: 4 - DNA, 1176 bp, Artificial Sequence
  Synthetic
atgagagaagtagtaattgccagtgcagctagaacagcagtaggaagttttggaggagcatttaaatcagtttcagcggtagagttaggggtaacagcagctaaagaagctataaaaagagctaacataactccagatatgatagatgaatctcttttagggggagtacttacagcaggtcttggacaaaatatagcaagacaaatagcattaggagcaggaataccagtagaaaaaccagctatgactataaatatagtttgtggttctggattaagatctgtttcaatggcatctcaacttatagcattaggtgatgctgatataatgttagttggtggagctgaaaacatgagtatgtctccttatttagtaccaagtgcgagatatggtgcaagaatgggtgatgctgcttttgttgattcaatgataaaagatggattatcagacatatttaataactatcacatgggtattactgctgaaaacatagcagagcaatggaatataactagagaagaacaagatgaattagctcttgcaagtcaaaataaagctgaaaaagctcaagctgaaggaaaatttgatgaagaaatagttcctgttgttataaaaggaagaaaaggtgacactgtagtagataaagatgaatatattaagcctggcactacaatggagaaacttgctaagttaagacctgcatttaaaaaagatggaacagttactgctggtaatgcatcaggaataaatgatggtgctgctatgttagtagtaatggctaaagaaaaagctgaagaactaggaatagagcctcttgcaactatagtttcttatggaacagctggtgttgaccctaaaataatgggatatggaccagttccagcaactaaaaaagctttagaagctgctaatatgactattgaagatatagatttagttgaagctaatgaggcatttgctgcccaatctgtagctgtaataagagacttaaatatagatatgaataaagttaatgttaatggtggagcaatagctataggacatccaataggatgctcaggagcaagaatacttactacacttttatatgaaatgaagagaagagatgctaaaactggtcttgctacactttgtataggcggtggaatgggaactactttaatagttaagagatag

SEQ ID NO: 5 - DNA, 846 bp, Artificial Sequence
  Synthetic
atgaaattagctgtaataggtagtggaactatgggaagtggtattgtacaaacttttgcaagttgtggacatgatgtatgtttaaagagtagaactcaaggtgctatagataaatgtttagctttattagataaaaatttaactaagttagttactaagggaaaaatggatgaagctacaaaagcagaaatattaagtcatgttagttcaactactaattatgaagatttaaaagatatggatttaataatagaagcatctgtagaagacatgaatataaagaaagatgttttcaagttactagatgaattatgtaaagaagatactatcttggcaacaaatacttcatcattatctataacagaaatagcttcttctactaagcgcccagataaagttataggaatgcatttctttaatccagttcctatgatgaaattagttgaagttataagtggtcagttaacatcaaaagttacttttgatacagtatttgaattatctaagagtatcaataaagtaccagtagatgtatctgaatctcctggatttgtagtaaatagaatacttatacctatgataaatgaagctgttggtatatatgcagatggtgttgcaagtaaagaagaaatagatgaagctatgaaattaggagcaaaccatccaatgggaccactagcattaggtgatttaatcggattagatgttgttttagctataatgaacgttttatatactgaatttggagatactaaatatagacctcatccacttttagctaaaatggttagagctaatcaattaggaagaaaaactaagataggattctatgattataataaataa

SEQ ID NO: 6 - DNA, 798 bp, Artificial Sequence
  Synthetic
atgagtacaagtgatgttaaagtttatgagaatgtagctgttgaagtagatggaaatatatgtacagtgaaaatgaatagacctaaagcccttaatgcaataaattcaaagactttagaagaactttatgaagtatttgtagatattaataatgatgaaactattgatgttgtaatattgacaggggaaggaaaggcatttgtagctggagcagatattgcatacatgaaagatttagatgctgtagctgctaaagattttagtatcttaggagcaaaagcttttggagaaatagaaaatagtaaaaaagtagtgatagctgctgtaaacggatttgctttaggtggaggatgtgaacttgcaatggcatgtgatataagaattgcatctgctaaagctaaatttggtcagccagaagtaactcttggaataactccaggatatggaggaactcaaaggcttacaagattggttggaatggcaaaagcaaaagaattaatctttacaggtcaagttataaaagctgatgaagctgaaaaaatagggctagtaaatagagtcgttgagccagacattttaatagaagaagttgagaaattagctaagataatagctaaaaatgctcagcttgcagttagatactctaaagaagcaatacaacttggtgctcaaactgatataaatactggaatagatatagaatctaatttatttggtctttgtttttcaactaaagaccaaaaagaaggaatgtcagctttcgttgaaaagagagaagctaactttataaaagggtaa

SEQ ID NO: 7 - DNA, 903 bp, Artificial Sequence
  Synthetic
atgagaagttttgaagaagtaattaagtttgcaaaagaaagaggacctaaaactatatcagtagcatgttgccaagataaagaagttttaatggcagttgaaatggctagaaaagaaaaaatagcaaatgccattttagtaggagatatagaaaagactaaagaaattgcaaaaagcatagacatggatatcgaaaattatgaactgatagatataaaagatttagcagaagcatctctaaaatctgttgaattagtttcacaaggaaaagccgacatggtaatgaaaggcttagtagacacatcaataatactaaaagcagttttaaataaagaagtaggtcttagaactggaaatgtattaagtcacgtagcagtatttgatgtagagggatatgatagattatttttcgtaactgacgcagctatgaacttagctcctgatacaaatactaaaaagcaaatcatagaaaatgcttgcacagtagcacattcattagatataagtgaaccaaaagttgctgcaatatgcgcaaaagaaaaagtaaatccaaaaatgaaagatacagttgaagctaaagaactagaagaaatgtatgaaagaggagaaatcaaaggttgtatggttggtgggccttttgcaattgataatgcagtatctttagaagcagctaaacataaaggtataaatcatcctgtagcaggacgagctgatatattattagccccagatattgaaggtggtaacatattatataaagctttggtattcttctcaaaatcaaaaaatgcaggagttatagttggggctaaagcaccaataatattaacttctagagcagacagtgaagaaactaaactaaactcaatagctttaggtgttttaatggcagcaaaggcataa

SEQ ID NO: 8 - DNA, 1080 bp, Artificial Sequence
  Synthetic
atgagcaaaatatttaaaatcttaacaataaatcctggttcgacatcaactaaaatagctgtatttgataatgaggatttagtatttgaaaaaactttaagacattcttcagaagaaataggaaaatatgagaaggtgtctgaccaatttgaatttcgtaaacaagtaatagaagaagctctaaaagaaggtggagtaaaaacatctgaattagatgctgtagtaggtagaggaggacttcttaaacctataaaaggtggtacttattcagtaagtgctgctatgattgaagatttaaaagtgggagttttaggagaacacgcttcaaacctaggtggaataatagcaaaacaaataggtgaagaagtaaatgttccttcatacatagtagaccctgttgttgtagatgaattagaagatgttgctagaatttctggtatgcctgaaataagtagagcaagtgtagtacatgctttaaatcaaaaggcaatagcaagaagatatgctagagaaataaacaagaaatatgaagatataaatcttatagttgcacacatgggtggaggagtttctgttggagctcataaaaatggtaaaatagtagatgttgcaaacgcattagatggagaaggacctttctctccagaaagaagtggtggactaccagtaggtgcattagtaaaaatgtgctttagtggaaaatatactcaagatgaaattaaaaagaaaataaaaggtaatggcggactagttgcatacttaaacactaatgatgctagagaagttgaagaaagaattgaagctggtgatgaaaaagctaaattagtatatgaagctatggcatatcaaatctctaaagaaataggagctagtgctgcagttcttaagggagatgtaaaagcaatattattaactggtggaatcgcatattcaaaaatgtttacagaaatgattgcagatagagttaaatttatagcagatgtaaaagtttatccaggtgaagatgaaatgattgcattagctcaaggtggacttagagttttaactggtgaagaagaggctcaagtttatgataactaa

SEQ ID NO: 9 - DNA, 1194 bp, Artificial Sequence
  Synthetic
atgatcgtaaaacctatggtacgcaacaatatctgcctgaacgcccatcctcagggctgcaagaagggagtggaagatcagattgaatataccaagaaacgcattaccgcagaagtcaaagctggcgcaaaagctccaaaaaacgttctggtgcttggctgctcaaatggttacggcctggcgagccgcattactgctgcgttcggatacggggctgcgaccatcggcgtgtcctttgaaaaagcgggttcagaaaccaaatatggtacaccgggatggtacaataatttggcatttgatgaagcggcaaaacgcgagggtctttatagcgtgacgatcgacggcgatgcgttttcagacgagatcaaggcccaggtaattgaggaagccaaaaaaaaaggtatcaaatttgatctgatcgtatacagcttggccagcccagtacgtactgatcctgatacaggtatcatgcacaaaagcgttttgaaaccctttggaaaaacgttcacaggcaaaacagtagatccgtttactggcgagctgaaggaaatctccgcggaaccagcaaatgacgaggaagcagccgccactgttaaagttatggggggtgaagattgggaacgttggattaagcagctgtcgaaggaaggcctcttagaagaaggctgtattaccttggcctatagttatattggccctgaagctacccaagctttgtaccgtaaaggcacaatcggcaaggccaaagaacacctggaggccacagcacaccgtctcaacaaagagaacccgtcaatccgtgccttcgtgagcgtgaataaaggcctggtaacccgcgcaagcgccgtaatcccggtaatccctctgtatctcgccagcttgttcaaagtaatgaaagagaagggcaatcatgaaggttgtattgaacagatcacgcgtctgtacgccgagcgcctgtaccgtaaagatggtacaattccagttgatgaggaaaatcgcattcgcattgatgattgggagttagaagaagacgtccagaaagcggtatccgcgttgatggagaaagtcacgggtgaaaacgcagaatctctcactgacttagcggggtaccgccatgatttcttagctagtaacggctttgatgtagaaggtattaattatgaagcggaagttgaacgcttcgaccgtatctga

SEQ ID NO: 10 - DNA, 861 bp, Artificial Sequence
  Synthetic
atgagtcaggcgctaaaaaatttactgacattgttaaatctggaaaaaattgaggaaggactctttcgcggccagagtgaagatttaggtttacgccaggtgtttggcggccaggtcgtgggtcaggccttgtatgctgcaaaagagaccgtccctgaagagcggctggtacattcgtttcacagctactttcttcgccctggcgatagtaagaagccgattatttatgatgtcgaaacgctgcgtgacggtaacagcttcagcgcccgccgggttgctgctattcaaaacggcaaaccgattttttatatgactgcctctttccaggcaccagaagcgggtttcgaacatcaaaaaacaatgccgtccgcgccagcgcctgatggcctcccttcggaaacgcaaatcgcccaatcgctggcgcacctgctgccgccagtgctgaaagataaattcatctgcgatcgtccgctggaagtccgtccggtggagtttcataacccactgaaaggtcacgtcgcagaaccacatcgtcaggtgtggatccgcgcaaatggtagcgtgccggatgacctgcgcgttcatcagtatctgctcggttacgcttctgatcttaacttcctgccggtagctctacagccgcacggcatcggttttctcgaaccggggattcagattgccaccattgaccattccatgtggttccatcgcccgtttaatttgaatgaatggctgctgtatagcgtggagagcacctcggcgtccagcgcacgtggctttgtgcgcggtgagttttatacccaagacggcgtactggttgcctcgaccgttcaggaaggggtgatgcgtaatcacaattaa

SEQ ID NO: 11 - protein, 378 aa, Artificial Sequence
  Synthetic
MDLNSKKYQMLKELYVSFAENEVKPLATELDEEERFPYETVEKMAKAGMMGIPYPKEYGGEGGDTVGYIMAVEELSRVCGTTGVILSAHTSLGSWPIYQYGNEEQKQKFLRPLASGEKLGAFGLTEPNAGTDASGQQTTAVLDGDEYILNGSKIFITNAIAGDIYVVMAMTDKSKGNKGISAFIVEKGTPGFSFGVKEKKMGIRGSATSELIFEDCRIPKENLLGKEGQGFKIAMSTLDGGRIGIAAQALGLAQGALDETVKYVKERVQFGRPLSKFQNTQFQLADMEVKVQAARHLVYQAAINKDLGKPYGVEAAMAKLFAAETAMEVTTKAVQLHGGYGYTRDYPVERMMRDAKITEIYEGTSEVQRMVISGKLLK

SEQ ID NO: 12 - protein, 260 aa, Artificial Sequence
  Synthetic
MNIVVCIKQVPDTTEVKLDPNTGTLIRDGVPSIINPDDKAGLEEAIKLKEEMGAHVTVITMGPPQADMALKEALAMGADRGILLTDRAFAGADTWATSSALAGALKNIDFDIIIAGRQAIDGDTAQVGPQIAEHLNLPSITYAEEIKTEGEYVLVKRQFEDCCHDLKVKMPCLITTLKDMNTPRYMKVGRIYDAFENDVVETWTVKDIEVDPSNLGLKGSPTSVFKSFTKSVKPAGTIYNEDAKTSAGIIIDKLKEKYII

SEQ ID NO: 13 - protein, 336 aa, Artificial Sequence
  Synthetic
MGNVLVVIEQRENVIQTVSLELLGKATEIAKDYDTKVSALLLGSKVEGLIDTLAHYGADEVIVVDDEALAVYTTEPYTKAAYEAIKAADPIVVLFGATSIGRDLAPRVSARIHTGLTADCTGLAVAEDTKLLLMTRPAFGGNIMATIVCKDFRPQMSTVRPGVMKKNEPDETKEAVINRFKVEFNDADKLVQVVQVIKEAKKQVKIEDAKILVSAGRGMGGKENLDILYELAEIIGGEVSGSRATIDAGWLDKARQVGQTGKTVRPDLYIACGISGAIQHIAGMEDAEFIVAINKNPEAPIFKYADVGIVGDVHKVLPELISQLSVAKEKGEVLAN

SEQ ID NO: 14 - protein, 397 aa, Artificial Sequence
  Synthetic
MIVKPMVRNNICLNAHPQGCKKGVEDQIEYTKKRITAEVKAGAKAPKNVLVLGCSNGYGLASRITAAFGYGAATIGVSFEKAGSETKYGTPGWYNNLAFDEAAKREGLYSVTIDGDAFSDEIKAQVIEEAKKKGIKFDLIVYSLASPVRTDPDTGIMHKSVLKPFGKTFTGKTVDPFTGELKEISAEPANDEEAAATVKVMGGEDWERWIKQLSKEGLLEEGCITLAYSYIGPEATQALYRKGTIGKAKEHLEATAHRLNKENPSIRAFVSVNKGLVTRASAVIPVIPLYLASLFKVMKEKGNHEGCIEQITRLYAERLYRKDGTIPVDEENRIRIDDWELEEDVQKAVSALMEKVTGENAESLTDLAGYRHDFLASNGFDVEGINYEAEVERFDRI

SEQ ID NO: 15 - protein, 391 aa, Artificial Sequence
  Synthetic
MREVVIASAARTAVGSFGGAFKSVSAVELGVTAAKEAIKRANITPDMIDESLLGGVLTAGLGQNIARQIALGAGIPVEKPAMTINIVCGSGLRSVSMASQLIALGDADIMLVGGAENMSMSPYLVPSARYGARMGDAAFVDSMIKDGLSDIFNNYHMGITAENIAEQWNITREEQDELALASQNKAEKAQAEGKFDEEIVPVVIKGRKGDTVVDKDEYIKPGTTMEKLAKLRPAFKKDGTVTAGNASGINDGAAMLVVMAKEKAEELGIEPLATIVSYGTAGVDPKIMGYGPVPATKKALEAANMTIEDIDLVEANEAFAAQSVAVIRDLNIDMNKVNVNGGAIAIGHPIGCSGARILTTLLYEMKRRDAKTGLATLCIGGGMGTTLIVKR

SEQ ID NO: 16 - protein, 281 aa, Artificial Sequence
  Synthetic
MKLAVIGSGTMGSGIVQTFASCGHDVCLKSRTQGAIDKCLALLDKNLTKLVTKGKMDEATKAEILSHVSSTTNYEDLKDMDLIIEASVEDMNIKKDVFKLLDELCKEDTILATNTSSLSITEIASSTKRPDKVIGMHFFNPVPMMKLVEVISGQLTSKVTFDTVFELSKSINKVPVDVSESPGFVVNRILIPMINEAVGIYADGVASKEEIDEAMKLGANHPMGPLALGDLIGLDVVLAIMNVLYTEFGDTKYRPHPLLAKMVRANQLGRKTKIGFYDYNK

SEQ ID NO: 17 - protein, 265 aa, Artificial Sequence
  Synthetic
MSTSDVKVYENVAVEVDGNICTVKMNRPKALNAINSKTLEELYEVFVDINNDETIDVVILTGEGKAFVAGADIAYMKDLDAVAAKDFSILGAKAFGEIENSKKVVIAAVNGFALGGGCELAMACDIRIASAKAKFGQPEVTLGITPGYGGTQRLTRLVGMAKAKELIFTGQVIKADEAEKIGLVNRVVEPDILIEEVEKLAKIIAKNAQLAVRYSKEAIQLGAQTDINTGIDIESNLFGLCFSTKDQKEGMSAFVEKREANFIKG

SEQ ID NO: 18 - protein, 300 aa, Artificial Sequence
  Synthetic
MRSFEEVIKFAKERGPKTISVACCQDKEVLMAVEMARKEKIANAILVGDIEKTKEIAKSIDMDIENYELIDIKDLAEASLKSVELVSQGKADMVMKGLVDTSIILKAVLNKEVGLRTGNVLSHVAVFDVEGYDRLFFVTDAAMNLAPDTNTKKQIIENACTVAHSLDISEPKVAAICAKEKVNPKMKDTVEAKELEEMYERGEIKGCMVGGPFAIDNAVSLEAAKHKGINHPVAGRADILLAPDIEGGNILYKALVFFSKSKNAGVIVGAKAPIILTSRADSEETKLNSIALGVLMAAKA

SEQ ID NO: 19 - protein, 359 aa, Artificial Sequence
  Synthetic
MSKIFKILTINPGSTSTKIAVFDNEDLVFEKTLRHSSEEIGKYEKVSDQFEFRKQVIEEALKEGGVKTSELDAVVGRGGLLKPIKGGTYSVSAAMIEDLKVGVLGEHASNLGGIIAKQIGEEVNVPSYIVDPVVVDELEDVARISGMPEISRASVVHALNQKAIARRYAREINKKYEDINLIVAHMGGGVSVGAHKNGKIVDVANALDGEGPFSPERSGGLPVGALVKMCFSGKYTQDEIKKKIKGNGGLVAYLNTNDAREVEERIEAGDEKAKLVYEAMAYQISKEIGASAAVLKGDVKAILLTGGIAYSKMFTEMIADRVKFIADVKVYPGEDEMIALAQGGLRVLTGEEEAQVYDN

SEQ ID NO: 20 - protein, 286 aa, Artificial Sequence
  Synthetic
MSQALKNLLTLLNLEKIEEGLFRGQSEDLGLRQVFGGQVVGQALYAAKETVPEERLVHSFHSYFLRPGDSKKPIIYDVETLRDGNSFSARRVAAIQNGKPIFYMTASFQAPEAGFEHQKTMPSAPAPDGLPSETQIAQSLAHLLPPVLKDKFICDRPLEVRPVEFHNPLKGHVAEPHRQVWIRANGSVPDDLRVHQYLLGYASDLNFLPVALQPHGIGFLEPGIQIATIDHSMWFHRPFNLNEWLLYSVESTSASSARGFVRGEFYTQDGVLVASTVQEGVMRNHN

SEQ ID NO: 21 - DNA, 1575 bp, Artificial Sequence
  Synthetic
atgcgcaaagtgccgattatcacggctgacgaggccgcaaaactgatcaaggacggcgacaccgtgacaactagcggctttgtgggtaacgcgatccctgaggcccttgaccgtgcagtcgaaaagcgtttcctggaaacgggcgaaccgaagaacattacttatgtatattgcggcagtcagggcaatcgcgacggtcgtggcgcagaacatttcgcgcatgaaggcctgctgaaacgttatatcgctggccattgggcgaccgtcccggcgttagggaaaatggccatggagaataaaatggaggcctacaatgtctctcagggcgccttgtgtcatctctttcgcgatattgcgagccataaaccgggtgtgttcacgaaagtaggaatcggcaccttcattgatccacgtaacggtggtgggaaggtcaacgatattaccaaggaagatatcgtagaactggtggaaattaaagggcaggaatacctgttttatccggcgttcccgatccatgtcgcgctgattcgtggcacctatgcggacgagagtggtaacatcacctttgaaaaagaggtagcgcctttggaagggacttctgtctgtcaagcggtgaagaactcgggtggcattgtcgtggttcaggttgagcgtgtcgtcaaagcaggcacgctggatccgcgccatgtgaaagttccgggtatctatgtagattacgtagtcgtcgcggatccggaggaccatcaacagtcccttgactgcgaatatgatcctgcccttagtggagagcaccgtcgtccggaggtggtgggtgaaccactgcctttatccgcgaagaaagtcatcggccgccgtggcgcgattgagctcgagaaagacgttgcagtgaaccttggggtaggtgcacctgagtatgtggcctccgtggccgatgaagaaggcattgtggattttatgactctcacagcggagtccggcgctatcggtggcgttccagccggcggtgttcgctttggggcgagctacaatgctgacgccttgatcgaccagggctaccaatttgattattacgacggtgggggtctggatctttgttacctgggtttagctgaatgcgacgaaaagggtaatatcaatgttagccgcttcggtcctcgtatcgctgggtgcggcggattcattaacattacccaaaacacgccgaaagtcttcttttgtgggacctttacagccggggggctgaaagtgaaaattgaagatggtaaggtgattatcgttcaggaagggaaacagaagaaattccttaaggcagtggagcaaatcacctttaatggagacgtggccttagcgaacaagcaacaagttacctacatcacggagcgttgcgtcttcctcctcaaagaagacggtttacacctttcggaaatcgcgccaggcatcgatctgcagacccagattttggatgttatggactttgccccgatcattgatcgtgacgcaaacgggcagattaaactgatggacgcggcgttattcgcagaagggctgatgggcttgaaagaaatgaagtcttaa

SEQ ID NO: 22 - DNA, 1269 bp, Artificial Sequence
  Synthetic
atgagcttaacccaaggcatgaaagctaaacaactgttagcatactttcagggtaaagccgatcaggatgcacgtgaagcgaaagcccgcggtgagctggtctgctggtcggcgtcagtcgcgccgccggaattttgcgtaacaatgggcattgccatgatctacccggagactcatgcagcgggcatcggtgcccgcaaaggtgcgatggacatgctggaagttgcggaccgcaaaggctacaacgtggattgttgttcctacggccgtgtaaatatgggttacatggaatgtttaaaagaagccgccatcacgggcgtcaagccggaagttttggttaattcccctgctgctgacgttccgcttcccgatttggtgattacgtgtaataatatctgtaacacgctgctgaaatggtacgaaaacttagcagcagaactcgatattccttgcatcgtgatcgacgtaccgtttaatcataccatgccgattccggaatatgccaaggcctacatcgcggaccagttccgcaatgcaatttctcagctggaagttatttgtggccgtccgttcgattggaagaaatttaaggaggtcaaagatcagacccagcgtagcgtataccactggaaccgcattgccgagatggcgaaatacaagcctagcccgctgaacggcttcgatctgttcaattacatggcgttaatcgtggcgtgccgcagcctggattatgcagaaattacctttaaagcgttcgcggacgaattagaagagaatttgaaggcgggtatctacgcctttaaaggtgcggaaaaaacgcgctttcaatgggaaggtatcgcggtgtggccacatttaggtcacacgtttaaatctatgaagaatctgaattcgattatgaccggtacggcataccccgccctttgggacctgcactatgacgctaacgacgaatctatgcactctatggctgaagcgtacacccgtatttatattaatacttgtctgcagaacaaagtagaggtcctgcttgggatcatggaaaaaggccaggtggatggtaccgtatatcatctgaatcgcagctgcaaactgatgagtttcctgaacgtggaaacggctgaaattattaaagagaagaacggtcttccttacgtctccattgatggcgatcagaccgatcctcgcgttttttctccggcccagtttgatacccgtgttcaggccctggttgagatgatggaggccaatatggcggcagcggaataa

SEQ ID NO: 23 - DNA, 1125 bp, Artificial Sequence
  Synthetic
atgtcacgcgtggaggcaatcctgtcgcagctgaaagatgtcgccgcgaatccgaaaaaagccatggatgactataaagctgaaacaggtaagggcgcggttggtatcatgccgatctacagccccgaagaaatggtacacgccgctggctatttgccgatgggaatctggggcgcccagggcaaaacgattagtaaagcgcgcacctatctgcctgcttttgcctgcagcgtaatgcagcaggttatggaattacagtgcgagggcgcgtatgatgacctgtccgcagttatttttagcgtaccgtgcgacactctcaaatgtcttagccagaaatggaaaggtacgtccccagtgattgtatttacgcatccgcagaaccgcggattagaagcggcgaaccaattcttggttaccgagtatgaactggtaaaagcacaactggaatcagttctgggtgtgaaaatttcaaacgccgccctggaaaattcgattgcaatttataacgagaatcgtgccgtgatgcgtgagttcgtgaaagtggcagcggactatcctcaagtcattgacgcagtgagccgccacgcggtttttaaagcgcgccagtttatgcttaaggaaaaacataccgcacttgtgaaagaactgatcgctgagattaaagcaacgccagtccagccgtgggacggaaaaaaggttgtagtgacgggcattctgttggaaccgaatgagttattagatatctttaatgagtttaagatcgcgattgttgatgatgatttagcgcaggaaagccgtcagatccgtgttgacgttctggacggagaaggcggaccgctctaccgtatggctaaagcgtggcagcaaatgtatggctgctcgctggcaaccgacaccaagaagggtcgcggccgtatgttaattaacaaaacgattcagaccggtgcggacgctatcgtagttgcaatgatgaagttttgcgacccagaagaatgggattatccggtaatgtaccgtgaatttgaagaaaaaggggtcaaatcacttatgattgaggtggatcaggaagtatcgtctttcgaacagattaaaacccgtctgcagtcattcgtcgaaatgctttaa

SEQ ID NO: 24 - DNA, 779 bp, Artificial Sequence
  Synthetic
atgtataccttggggattgatgtcggttctgcctctagtaaagcggtgattctgaaagatggaaaagatattgtcgctgccgaggttgtccaagtcggtaccggctcctcgggtccccaacgcgcactggacaaagcctttgaagtctctggcttaaaaaaggaagacatcagctacacagtagctacgggctatgggcgcttcaattttagcgacgcggataaacagatttcggaaattagctgtcatgccaaaggcatttatttcttagtaccaactgcgcgcactattattgacattggcggccaagatgcgaaagccatccgcctggacgacaaggggggtattaagcaattcttcatgaatgataaatgcgcggcgggcacggggcgtttcctggaagtcatggctcgcgtacttgaaaccaccctggatgaaatggctgaactggatgaacaggcgactgacaccgctcccatttcaagcacctgcacggttttcgccgaaagcgaagtaattagccaattgagcaatggtgtctcacgcaacaacatcattaaaggtgtccatctgagcgttgcgtcacgtgcgtgtggtctggcgtatcgcggcggtttggagaaagatgttgttatgacaggtggcgtggcaaaaaatgcaggggtggtgcgcgcggtggcgggcgttctgaagaccgatgttatcgttgctccgaatcctcagacgaccggtgcactgggggcagcgctgtatgcttatgaggccgcccagaagaagta

SEQ ID NO: 25 - DNA, 1104 bp, Artificial Sequence
  Synthetic
atggccttcaatagcgcagatattaattctttccgcgatatttgggtgttttgtgaacagcgtgagggcaaactgattaacaccgatttcgaattaattagcgaaggtcgtaaactggctgacgaacgcggaagcaaactggttggaattttgctggggcacgaagttgaagaaatcgcaaaagaattaggcggctatggtgcggacaaggtaattgtgtgcgatcatccggaacttaaattttacactacggatgcttatgccaaagttttatgtgacgtcgtgatggaagagaaaccggaggtaattttgatcggtgccaccaacattggccgtgatctcggaccgcgttgtgctgcacgcttgcacacggggctgacggctgattgcacgcacctggatattgatatgaataaatatgtggactttcttagcaccagtagcaccttggatatctcgtcgatgactttccctatggaagatacaaaccttaaaatgacgcgccctgcatttggcggacatctgatggcaacgatcatttgtccacgcttccgtccctgtatgagcacagtgcgccccggagtgatgaagaaagcggagttctcgcaggagatggcgcaagcatgtcaagtagtgacccgtcacgtaaatttgtcggatgaagaccttaaaactaaagtaattaatatcgtgaaggaaacgaaaaagattgtggatctgatcggcgcagaaattattgtgtcagttggtcgtggtatctcgaaagatgtccaaggtggaattgcactggctgaaaaacttgcggacgcatttggtaacggtgtcgtgggcggctcgcgcgcagtgattgattccggctggttacctgcggatcatcaggttggacaaaccggtaagaccgtgcacccgaaagtctacgtggcgctgggtattagtggggctatccagcataaggctgggatgcaagactctgaactgatcattgccgtcaacaaagacgaaacggcgcctatcttcgactgcgccgattatggcatcaccggtgatttatttaaaatcgtaccgatgatgatcgacgcgatcaaagagggtaaaaacgcatga

SEQ ID NO: 26 - DNA, 804 bp, Artificial Sequence
  Synthetic
atgcgcatctatgtgtgtgtgaaacaagtcccagatacgagcggcaaggtggccgttaaccctgatgggacccttaaccgtgcctcaatggcagcgattattaacccggacgatatgtccgcgatcgaacaggcattaaaactgaaagatgaaaccggatgccaggttacggcgcttacgatgggtcctcctcctgccgagggcatgttgcgcgaaattattgcaatgggggccgacgatggtgtgctgatttcggcccgtgaatttggggggtccgataccttcgcaaccagtcaaattattagcgcggcaatccataaattaggcttaagcaatgaagacatgatcttttgcggtcgtcaggccattgacggtgatacggcccaagtcggccctcaaattgccgaaaaactgagcatcccacaggtaacctatggcgcaggaatcaaaaaatctggtgatttagtgctggtgaagcgtatgttggaggatggttatatgatgatcgaagtcgaaactccatgtctgattacctgcattcaggataaagcggtaaaaccacgttacatgactctcaacggtattatggaatgctactccaagccgctcctcgttctcgattacgaagcactgaaagatgaaccgctgatcgaacttgataccattgggcttaaaggctccccgacgaatatctttaaatcgtttacgccgcctcagaaaggcgttggtgtcatgctccaaggcaccgataaggaaaaagtcgaggatctggtggataagctgatgcagaaacatgtcatctaa

SEQ ID NO: 27 - DNA, 1185 bp, Artificial Sequence
  Synthetic
atgttcttactgaagattaaaaaagaacgtatgaaacgcatggactttagtttaacgcgtgaacaggagatgttaaaaaaactggcgcgtcagtttgctgagatcgagctggaaccggtggccgaagagattgatcgtgagcacgtttttcctgcagaaaactttaagaagatggcggaaattggcttaaccggcattggtatcccgaaagaatttggtggctccggtggaggcaccctggagaaggtcattgccgtgtcagaattcggcaaaaagtgtatggcctcagcttccattttaagcattcatcttatcgcgccgcaggcaatctacaaatatgggaccaaagaacagaaagagacgtacctgccgcgtcttaccaaaggtggtgaactgggcgcctttgcgctgacagaaccaaacgccggaagcgatgccggcgcggtaaaaacgaccgcgattctggacagccagacaaacgagtacgtgctgaatggcaccaaatgctttatcagcgggggcgggcgcgcgggtgttcttgtaatttttgcgcttactgaaccgaaaaaaggtctgaaagggatgagcgcgattatcgtggagaaagggaccccgggcttcagcatcggcaaggtggagagcaagatggggatcgcaggttcggaaaccgcggaacttatcttcgaagattgtcgcgttccggctgccaaccttttaggtaaagaaggcaaaggctttaaaattgctatggaagccctggatggcgcccgtattggcgtgggcgctcaagcaatcggaattgccgagggggcgatcgacctgagtgtgaagtacgttcacgagcgcattcaatttggtaaaccgatcgcgaatctgcagggaattcaatggtatatcgcggatatggcgaccaaaaccgccgcggcacgcgcacttgttgagtttgcagcgtatcttgaagacgcgggtaaaccgttcacaaaggaatctgctatgtgcaagctgaacgcctccgaaaacgcgcgttttgtgacaaatttagctctgcagattcacgggggttacggttatatgaaagattatccgttagagcgtatgtatcgcgatgctaagattacggaaatttacgaggggacatcagaaatccataaggtggtgattgcgcgtgaagtaatgaaacgctaa

SEQ ID NO: 28 - DNA, 2463 bp, Artificial Sequence
  Synthetic
atgcgagtgttgaagttcggcggtacatcagtggcaaatgcagaacgttttctgcgtgttgccgatattctggaaagcaatgccaggcaggggcaggtggccaccgtcctctctgcccccgccaaaatcaccaaccacctggtggcgatgattgaaaaaaccattagcggccaggatgctttacccaatatcagcgatgccgaacgtatttttgccgaacttttgacgggactcgccgccgcccagccggggttcccgctggcgcaattgaaaactttcgtcgatcaggaatttgcccaaataaaacatgtcctgcatggcattagtttgttggggcagtgcccggatagcatcaacgctgcgctgatttgccgtggcgagaaaatgtcgatcgccattatggccggcgtattagaagcgcgcggtcacaacgttactgttatcgatccggtcgaaaaactgctggcagtggggcattacctcgaatctaccgtcgatattgctgagtccacccgccgtattgcggcaagccgcattccggctgatcacatggtgctgatggcaggtttcaccgccggtaatgaaaaaggcgaactggtggtgcttggacgcaacggttccgactactctgctgcggtgctggctgcctgtttacgcgccgattgttgcgagatttggacggacgttgacggggtctatacctgcgacccgcgtcaggtgcccgatgcgaggttgttgaagtcgatgtcctaccaggaagcgatggagctttcctacttcggcgctaaagttcttcacccccgcaccattacccccatcgcccagttccagatcccttgcctgattaaaaataccggaaatcctcaagcaccaggtacgctcattggtgccagccgtgatgaagacgaattaccggtcaagggcatttccaatctgaataacatggcaatgttcagcgtttctggtccggggatgaaagggatggtcggcatggcggcgcgcgtctttgcagcgatgtcacgcgcccgtatttccgtggtgctgattacgcaatcatcttccgaatacagcatcagtttctgcgttccacaaagcgactgtgtgcgagctgaacgggcaatgcaggaagagttctacctggaactgaaagaaggcttactggagccgctggcagtgacggaacggctggccattatctcggtggtaggtgatggtatgcgcaccttgcgtgggatctcggcgaaattctttgccgcactggcccgcgccaatatcaacattgtcgccattgctcagagatcttctgaacgctcaatctctgtcgtggtaaataacgatgatgcgaccactggcgtgcgcgttactcatcagatgctgttcaataccgatcaggttatcgaagtgtttgtgattggcgtcggtggcgttggcggtgcgctgctggagcaactgaagcgtcagcaaagctggctgaagaataaacatatcgacttacgtgtctgcggtgttgccaactcgaaggctctgctcaccaatgtacatggccttaatctggaaaactggcaggaagaactggcgcaagccaaagagccgtttaatctcgggcgcttaattcgcctcgtgaaagaatatcatctgctgaacccggtcattgttgactgcacttccagccaggcagtggcggatcaatatgccgacttcctgcgcgaaggtttccacgttgtcacgccgaacaaaaaggccaacacctcgtcgatggattactaccatcagttgcgttatgcggcggaaaaatcgcggcgtaaattcctctatgacaccaacgttggggctggattaccggttattgagaacctgcaaaatctgctcaatgcaggtgatgaattgatgaagttctccggcattctttctggttcgctttcttatatcttcggcaagttagacgaaggcatgagtttctccgaggcgaccacgctggcgcgggaaatgggttataccgaaccggacccgcgagatgatctttctggtatggatgtggcgcgtaaactattgattctcgctcgtgaaacgggacgtgaactggagctggcggatattgaaattgaacctgtgctgcccgcagagtttaacgccgagggtgatgttgccgcttttatggcgaatctgtcacaactcgacgatctctttgccgcgcgcgtggcgaaggcccgtgatgaaggaaaagttttgcgctatgttggcaatattgatgaagatggcgtctgccgcgtgaagattgccgaagtggatggtaatgatccgctgttcaaagtgaaaaatggcgaaaacgccctggccttctatagccactattatcagccgctgccgttggtactgcgcggatatggtgcgggcaatgacgttacagctgccggtgtctttgctgatctgctacgtaccctctcatggaagttaggagtctga

SEQ ID NO: 29 - DNA, 933 bp, Artificial Sequence
  Synthetic
atggttaaagtttatgccccggcttccagtgccaatatgagcgtcgggtttgatgtgctcggggcggcggtgacacctgttgatggtgcattgctcggagatgtagtcacggttgaggcggcagagacattcagtctcaacaacctcggacgctttgccgataagctgccgtcagaaccacgggaaaatatcgtttatcagtgctgggagcgtttttgccaggaactgggtaagcaaattccagtggcgatgaccctggaaaagaatatgccgatcggttcgggcttaggctccagtgcctgttcggtggtcgcggcgctgatggcgatgaatgaacactgcggcaagccgcttaatgacactcgtttgctggctttgatgggcgagctggaaggccgtatctccggcagcattcattacgacaacgtggcaccgtgttttctcggtggtatgcagttgatgatcgaagaaaacgacatcatcagccagcaagtgccagggtttgatgagtggctgtgggtgctggcgtatccggggattaaagtctcgacggcagaagccagggctattttaccggcgcagtatcgccgccaggattgcattgcgcacgggcgacatctggcaggcttcattcacgcctgctattcccgtcagcctgagcttgccgcgaagctgatgaaagatgttatcgctgaaccctaccgtgaacggttactgccaggcttccggcaggcgcggcaggcggtcgcggaaatcggcgcggtagcgagcggtatctccggctccggcccgaccttgttcgctctgtgtgacaagccggaaaccgcccagcgcgttgccgactggttgggtaagaactacctgcaaaatcaggaaggttttgttcatatttgccggctggatacggcgggcgcacgagtactggaaaactaa

SEQ ID NO: 30 - DNA, 1287 bp, Artificial Sequence
  Synthetic
atgaaactctacaatctgaaagatcacaacgagcaggtcagctttgcgcaagccgtaacccaggggttgggcaaaaatcaggggctgttttttccgcacgacctgccggaattcagcctgactgaaattgatgagatgctgaagctggattttgtcacccgcagtgcgaagatcctctcggcgtttattggtgatgaaatcccacaggaaatcctggaagagcgcgtgcgcgcggcgtttgccttcccggctccggtcgccaatgttgaaagcgatgtcggttgtctggaattgttccacgggccaacgctggcatttaaagatttcggcggtcgctttatggcacaaatgctgacccatattgcgggtgataagccagtgaccattctgaccgcgacctccggtgataccggagcggcagtggctcatgctttctacggtttaccgaatgtgaaagtggttatcctctatccacgaggcaaaatcagtccactgcaagaaaaactgttctgtacattgggcggcaatatcgaaactgttgccatcgacggcgatttcgatgcctgtcaggcgctggtgaagcaggcgtttgatgatgaagaactgaaagtggcgctagggttaaactcggctaactcgattaacatcagccgtttgctggcgcagatttgctactactttgaagctgttgcgcagctgccgcaggagacgcgcaaccagctggttgtctcggtgccaagcggaaacttcggcgatttgacggcgggtctgctggcgaagtcactcggtctgccggtgaaacgttttattgctgcgaccaacgtgaacgataccgtgccacgtttcctgcacgacggtcagtggtcacccaaagcgactcaggcgacgttatccaacgcgatggacgtgagtcagccgaacaactggccgcgtgtggaagagttgttccgccgcaaaatctggcaactgaaagagctgggttatgcagccgtggatgatgaaaccacgcaacagacaatgcgtgagttaaaagaactgggctacacttcggagccgcacgctgccgtagcttatcgtgcgctgcgtgatcagttgaatccaggcgaatatggcttgttcctcggcaccgcgcatccggcgaaatttaaagagagcgtggaagcgattctcggtgaaacgttggatctgccaaaagagctggcagaacgtgctgatttacccttgctttcacataatctgcccgccgattttgctgcgttgcgtaaattgatgatgaatcatcagtaa

SEQ ID NO: 31 - DNA, 1311 bp, Artificial Sequence
  Synthetic
atgagtgaaacatacgtgtctgagaaaagtccaggagtgatggctagcggagcggagctgattcgtgccgccgacattcaaacggcgcaggcacgaatttcctccgtcattgcaccaactccattgcagtattgccctcgtctttctgaggaaaccggagcggaaatctaccttaagcgtgaggatctgcaggatgttcgttcctacaagatccgcggtgcgctgaactctggagcgcagctcacccaagagcagcgcgatgcaggtatcgttgccgcatctgcaggtaaccatgcccagggcgtggcctatgtgtgcaagtccttgggcgttcagggacgcatctatgttcctgtgcagactccaaagcaaaagcgtgaccgcatcatggttcacggcggagagtttgtctccttggtggtcactggcaataacttcgacgaagcatcggctgcagcgcatgaagatgcagagcgcaccggcgcaacgctgatcgagcctttcgatgctcgcaacaccgtcatcggtcagggcaccgtggctgctgagatcttgtcgcagctgacttccatgggcaagagtgcagatcacgtgatggttccagtcggcggtggcggacttcttgcaggtgtggtcagctacatggctgatatggcacctcgcactgcgatcgttggtatcgaaccagcgggagcagcatccatgcaggctgcattgcacaatggtggaccaatcactttggagactgttgatccctttgtggacggcgcagcagtcaaacgtgtcggagatctcaactacaccatcgtggagaagaaccagggtcgcgtgcacatgatgagcgcgaccgagggcgctgtgtgtactgagatgctcgatctttaccaaaacgaaggcatcatcgcggagcctgctggcgcgctgtctatcgctgggttgaaggaaatgtcctttgcacctggttctgcagtggtgtgcatcatctctggtggcaacaacgatgtgctgcgttatgcggaaatcgctgagcgctccttggtgcaccgcggtttgaagcactacttcttggtgaacttcccgcaaaagcctggtcagttgcgtcacttcctggaagatatcctgggaccggatgatgacatcacgctgtttgagtacctcaagcgcaacaaccgtgagaccggtactgcgttggtgggtattcacttgagtgaagcatcaggattggattctttgctggaacgtatggaggaatcggcaattgattcccgtcgcctcgagccgggcacccctgagtacgaatacttgacctaa

SEQ ID NO: 32 - DNA, 2664 bp, Artificial Sequence
  Synthetic
atgtcagaacgtttcccaaatgacgtggatccgatcgaaactcgcgactggctccaggcgatcgaatcggtcatccgtgaagaaggtgttgagcgtgctcagtatctgatcgaccaactgcttgctgaagcccgcaaaggcggtgtaaacgtagccgcaggcacaggtatcagcaactacatcaacaccatccccgttgaagaacaaccggagtatccgggtaatctggaactggaacgccgtattcgttcagctatccgctggaacgccatcatgacggtgctgcgtgcgtcgaaaaaagacctcgaactgggcggccatatggcgtccttccagtcttccgcaaccatttatgatgtgtgctttaaccacttcttccgtgcacgcaacgagcaggatggcggcgacctggtttacttccagggccacatctccccgggcgtgtacgctcgtgctttcctggaaggtcgtctgactcaggagcagctggataacttccgtcaggaagttcacggcaatggcctctcttcctatccgcacccgaaactgatgccggaattctggcagttcccgaccgtatctatgggtctgggtccgattggtgctatttaccaggctaaattcctgaaatatctggaacaccgtggcctgaaagatacctctaaacaaaccgtttacgcgttcctcggtgacggtgaaatggacgaaccggaatccaaaggtgcgatcaccatcgctacccgtgaaaaactggataacctggtcttcgttatcaactgtaacctgcagcgtcttgacggcccggtcaccggtaacggcaagatcatcaacgaactggaaggcatcttcgaaggtgctggctggaacgtgatcaaagtgatgtggggtagccgttgggatgaactgctgcgtaaggataccagcggtaaactgatccagctgatgaacgaaaccgttgacggcgactaccagaccttcaaatcgaaagatggtgcgtacgttcgtgaacacttcttcggtaaatatcctgaaaccgcagcactggttgcagactggactgacgagcagatctgggcactgaaccgtggtggtcacgatccgaagaaaatctacgctgcattcaagaaagcgcaggaaaccaaaggcaaagcgacagtaatccttgctcataccattaaaggttacggcatgggcgacgcggctgaaggtaaaaacatcgcgcaccaggttaagaaaatgaacatggacggtgtgcgtcatatccgcgaccgtttcaatgtgccggtgtctgatgcagatatcgaaaaactgccgtacatcaccttcccggaaggttctgaagagcatacctatctgcacgctcagcgtcagaaactgcacggttatctgccaagccgtcagccgaacttcaccgagaagcttgagctgccgagcctgcaagacttcggcgcgctgttggaagagcagagcaaagagatctctaccactatcgctttcgttcgtgctctgaacgtgatgctgaagaacaagtcgatcaaagatcgtctggtaccgatcatcgccgacgaagcgcgtactttcggtatggaaggtctgttccgtcagattggtatttacagcccgaacggtcagcagtacaccccgcaggaccgcgagcaggttgcttactataaagaagacgagaaaggtcagattctgcaggaagggatcaacgagctgggcgcaggttgttcctggctggcagcggcgacctcttacagcaccaacaatctgccgatgatcccgttctacatctattactcgatgttcggcttccagcgtattggcgatctgtgctgggcggctggcgaccagcaagcgcgtggcttcctgatcggcggtacttccggtcgtaccaccctgaacggcgaaggtctgcagcacgaagatggtcacagccacattcagtcgctgactatcccgaactgtatctcttacgacccggcttacgcttacgaagttgctgtcatcatgcatgacggtctggagcgtatgtacggtgaaaaacaagagaacgtttactactacatcactacgctgaacgaaaactaccacatgccggcaatgccggaaggtgctgaggaaggtatccgtaaaggtatctacaaactcgaaactattgaaggtagcaaaggtaaagttcagctgctcggctccggttctatcctgcgtcacgtccgtgaagcagctgagatcctggcgaaagattacggcgtaggttctgacgtttatagcgtgacctccttcaccgagctggcgcgtgatggtcaggattgtgaacgctggaacatgctgcacccgctggaaactccgcgcgttccgtatatcgctcaggtgatgaacgacgctccggcagtggcatctaccgactatatgaaactgttcgctgagcaggtccgtacttacgtaccggctgacgactaccgcgtactgggtactgatggcttcggtcgttccgacagccgtgagaacctgcgtcaccacttcgaagttgatgcttcttatgtcgtggttgcggcgctgggcgaactggctaaacgtggcgaaatcgataagaaagtggttgctgacgcaatcgccaaattcaacatcgatgcagataaagttaacccgcgtctggcgtaa

SEQ ID NO: 33 - DNA, 1893 bp, Artificial Sequence
  Synthetic
atggctatcgaaatcaaagtaccggacatcggggctgatgaagttgaaatcaccgagatcctggtcaaagtgggcgacaaagttgaagccgaacagtcgctgatcaccgtagaaggcgacaaagcctctatggaagttccgtctccgcaggcgggtatcgttaaagagatcaaagtctctgttggcgataaaacccagaccggcgcactgattatgattttcgattccgccgacggtgcagcagacgctgcacctgctcaggcagaagagaagaaagaagcagctccggcagcagcaccagcggctgcggcggcaaaagacgttaacgttccggatatcggcagcgacgaagttgaagtgaccgaaatcctggtgaaagttggcgataaagttgaagctgaacagtcgctgatcaccgtagaaggcgacaaggcttctatggaagttccggctccgtttgctggcaccgtgaaagagatcaaagtgaacgtgggtgacaaagtgtctaccggctcgctgattatggtcttcgaagtcgcgggtgaagcaggcgcggcagctccggccgctaaacaggaagcagctccggcagcggcccctgcaccagcggctggcgtgaaagaagttaacgttccggatatcggcggtgacgaagttgaagtgactgaagtgatggtgaaagtgggcgacaaagttgccgctgaacagtcactgatcaccgtagaaggcgacaaagcttctatggaagttccggcgccgtttgcaggcgtcgtgaaggaactgaaagtcaacgttggcgataaagtgaaaactggctcgctgattatgatcttcgaagttgaaggcgcagcgcctgcggcagctcctgcgaaacaggaagcggcagcgccggcaccggcagcaaaagctgaagccccggcagcagcaccagctgcgaaagcggaaggcaaatctgaatttgctgaaaacgacgcttatgttcacgcgactccgctgatccgccgtctggcacgcgagtttggtgttaaccttgcgaaagtgaagggcactggccgtaaaggtcgtatcctgcgcgaagacgttcaggcttacgtgaaagaagctatcaaacgtgcagaagcagctccggcagcgactggcggtggtatccctggcatgctgccgtggccgaaggtggacttcagcaagtttggtgaaatcgaagaagtggaactgggccgcatccagaaaatctctggtgcgaacctgagccgtaactgggtaatgatcccgcatgttactcacttcgacaaaaccgatatcaccgagttggaagcgttccgtaaacagcagaacgaagaagcggcgaaacgtaagctggatgtgaagatcaccccggttgtcttcatcatgaaagccgttgctgcagctcttgagcagatgcctcgcttcaatagttcgctgtcggaagacggtcagcgtctgaccctgaagaaatacatcaacatcggtgtggcggtggataccccgaacggtctggttgttccggtattcaaagacgtcaacaagaaaggcatcatcgagctgtctcgcgagctgatgactatttctaagaaagcgcgtgacggtaagctgactgcgggcgaaatgcagggcggttgcttcaccatctccagcatcggcggcctgggtactacccacttcgcgccgattgtgaacgcgccggaagtggctatcctcggcgtttccaagtccgcgatggagccggtgtggaatggtaaagagttcgtgccgcgtctgatgctgccgatttctctctccttcgaccaccgcgtgatcgacggtgctgatggtgcccgtttcattaccatcattaacaacacgctgtctgacattcgccgtctggtgatgtaa

SEQ ID NO: 34 - DNA, 1425 bp, Artificial Sequence
  Synthetic
atgagtactgaaatcaaaactcaggtcgtggtacttggggcaggccccgcaggttactccgctgccttccgttgcgctgatttaggtctggaaaccgtaatcgtagaacgttacaacacccttggcggtgtttgcctgaacgtcggctgtatcccttctaaagcactgctgcacgtagcaaaagttatcgaagaagccaaagcgctggctgaacacggtatcgtcttcggcgaaccgaaaaccgatatcgacaagattcgtacctggaaagagaaagtgatcaatcagctgaccggtggtctggctggtatggcgaaaggccgcaaagtcaaagtggtcaacggtctgggtaaattcaccggggctaacaccctggaagttgaaggtgagaacggcaaaaccgtgatcaacttcgacaacgcgatcattgcagcgggttctcgcccgatccaactgccgtttattccgcatgaagatccgcgtatctgggactccactgacgcgctggaactgaaagaagtaccagaacgcctgctggtaatgggtggcggtatcatcggtctggaaatgggcaccgtttaccacgcgctgggttcacagattgacgtggttgaaatgttcgaccaggttatcccggcagctgacaaagacatcgttaaagtcttcaccaagcgtatcagcaagaaattcaacctgatgctggaaaccaaagttaccgccgttgaagcgaaagaagacggcatttatgtgacgatggaaggcaaaaaagcacccgctgaaccgcagcgttacgacgccgtgctggtagcgattggtcgtgtgccgaacggtaaaaacctcgacgcaggcaaagcaggcgtggaagttgacgaccgtggtttcatccgcgttgacaaacagctgcgtaccaacgtaccgcacatctttgctatcggcgatatcgtcggtcaaccgatgctggcacacaaaggtgttcacgaaggtcacgttgccgctgaagttatcgccggtaagaaacactacttcgatccgaaagttatcccgtccatcgcctataccaaaccagaagttgcatgggtgggtctgactgagaaagaagcgaaagagaaaggcatcagctatgaaaccgccaccttcccgtgggctgcttctggtcgtgctatcgcttccgactgcgcagacggtatgaccaagctgattttcgacaaagaatctcaccgtgtgatcggtggtgcgattgtcggtactaacggcggcgagctgctgggtgaaatcggcctggcaatcgaaatgggttgtgatgctgaagacatcgcactgaccatccacgcgcacccgactctgcacgagtctgtgggcctggcggcagaagtgttcgaaggtagcattaccgacctgccgaacccgaaagcgaagaagaagtaa

SEQ ID NO: 35 - DNA, 981 bp, Artificial Sequence
  Synthetic
atgcgtgcggtactgatcgagaagtccgatgatacacagtccgtctctgtcaccgaactggctgaagatcaactgccggaaggcgacgttttggtagatgttgcttattcaacactgaactacaaagacgccctggcaattaccggtaaagcccccgtcgttcgtcgttttccgatggtacctggaatcgactttacgggtaccgtggcccagtcttcccacgccgacttcaagccaggtgatcgcgtaatcctgaatggttggggtgtgggggaaaaacattggggcggtttagcggagcgcgctcgcgtgcgcggagactggcttgttcccttgccagcccccctggacttacgccaagcggccatgatcggtacagcaggatacacggcgatgttgtgcgttctggcgcttgaacgtcacggagtggtgccgggtaatggggaaatcgtggtgtccggtgcagcaggcggcgtcggctccgttgcgacgacccttcttgccgctaagggctatgaggtagcggcagtgactggacgtgcgtccgaagcagaatatctgcgcggtttgggggcggcgagcgtaattgatcgtaacgaattaacggggaaggtacgcccgctgggtcaggagcgttgggctggcgggattgacgtggcgggatcaaccgtgcttgcgaacatgctttctatgatgaagtatcgcggggtagtcgctgcgtgtggcctggccgcgggcatggatctgcccgcgtctgtcgcgccctttattcttcgtgggatgacgctggcaggggtggatagcgttatgtgcccaaagacagatcgtttagcagcgtgggcccgtttggcgtcagatcttgaccctgccaagctggaggagatgactacagagttgccgtttagtgaagtaatcgagacagcacccaaattcttggacgggacggttcgtggccgcattgttatccccgtaacgccctaa

SEQ ID NO: 36 - DNA, 2145 bp, Artificial Sequence
  Synthetic
atgtctaacgtgcaggagtggcaacagcttgccaacaaggaattgagccgtcgggagaaaactgtcgactcgctggttcatcaaaccgcggaagggatcgccatcaagccgctgtataccgaagccgatctcgataatctggaggtgacaggtacccttcctggtttgccgccctacgttcgtggcccgcgtgccactatgtataccgcccaaccgtggaccatccgtcagtatgctggtttttcaacagcaaaagagtccaacgctttttatcgccgtaacctggccgccgggcaaaaaggtctttccgttgcgtttgaccttgccacccaccgtggctacgactccgataacccgcgcgtggcgggcgacgtcggcaaagcgggcgtcgctatcgacaccgtggaagatatgaaagtcctgttcgaccagatcccgctggataaaatgtcggtttcgatgaccatgaatggcgcagtgctaccagtactggcgttttatatcgtcgccgcagaagagcaaggtgttacacctgataaactgaccggcaccattcaaaacgatattctcaaagagtacctctgccgcaacacctatatttacccaccaaaaccgtcaatgcgcattatcgccgacatcatcgcctggtgttccggcaacatgccgcgatttaataccatcagtatcagcggttaccacatgggtgaagcgggtgccaactgcgtgcagcaggtagcatttacgctcgctgatgggattgagtacatcaaagcagcaatctctgccggactgaaaattgatgacttcgctcctcgcctgtcgttcttcttcggcatcggcatggatctgtttatgaacgtcgccatgttgcgtgcggcacgttatttatggagcgaagcggtcagtggatttggcgcacaggacccgaaatcactggcgctgcgtacccactgccagacctcaggctggagcctgactgaacaggatccgtataacaacgttatccgcaccaccattgaagcgctggctgcgacgctgggcggtactcagtcactgcataccaacgcctttgacgaagcgcttggtttgcctaccgatttctcagcacgcattgcccgcaacacccagatcatcatccaggaagaatcagaactctgccgcaccgtcgatccactggccggatcctattacattgagtcgctgaccgatcaaatcgtcaaacaagccagagctattatccaacagatcgacgaagccggtggcatggcgaaagcgatcgaagcaggtctgccaaaacgaatgatcgaagaggcctcagcgcgcgaacagtcgctgatcgaccagggcaagcgtgtcatcgttggtgtcaacaagtacaaactggatcacgaagacgaaaccgatgtacttgagatcgacaacgtgatggtgcgtaacgagcaaattgcttcgctggaacgcattcgcgccacccgtgatgatgccgccgtaaccgccgcgttgaacgccctgactcacgccgcacagcataacgaaaacctgctggctgccgctgttaatgccgctcgcgttcgcgccaccctgggtgaaatttccgatgcgctggaagtcgctttcgaccgttatctggtgccaagccagtgtgttaccggcgtgattgcgcaaagctatcatcagtctgagaaatcggcctccgagttcgatgccattgttgcgcaaacggagcagttccttgccgacaatggtcgtcgcccgcgcattctgatcgctaagatgggccaggatggacacgatcgcggcgcgaaagtgatcgccagcgcctattccgatctcggtttcgacgtagatttaagcccgatgttctctacacctgaagagatcgcccgcctggccgtagaaaacgacgttcacgtagtgggcgcatcctcactggctgccggtcataaaacgctgatcccggaactggtcgaagcgctgaaaaaatggggacgcgaagatatctgcgtggtcgcgggtggcgtcattccgccgcaggattacgccttcctgcaagagcgcggcgtggcggcgatttatggtccaggtacacctatgctcgacagtgtgcgcgacgtactgaatctgataagccagcatcatgattaa

SEQ ID NO: 37 - DNA, 996 bp, Artificial Sequence
  Synthetic
atgattaatgaagccacgctggcagaaagtattcgccgcttacgtcagggtgagcgtgccacactcgcccaggccatgacgctggtggaaagccgtcacccgcgtcatcaggcactaagtacgcagctgcttgatgccattatgccgtactgcggtaacaccctgcgactgggcgttaccggcacccccggcgcggggaaaagtacctttcttgaggcctttggcatgttgttgattcgagagggattaaaggtcgcggttattgcggtcgatcccagcagcccggtcactggcggtagcattctcggggataaaacccgcatgaatgacctggcgcgtgccgaagcggcgtttattcgcccggtaccatcctccggtcatctgggcggtgccagtcagcgagcgcgggaattaatgctgttatgcgaagcagcgggttatgacgtagtgattgtcgaaacggttggcgtcgggcagtcggaaacagaagtcgcccgcatggtggactgttttatctcgttgcaaattgccggtggcggcgatgatctgcagggcattaaaaaagggctgatggaagtggctgatctgatcgttatcaacaaagacgatggcgataaccataccaatgtcgccattgcccggcatatgtacgagagtgccctgcatattctgcgacgtaaatacgacgaatggcagccacgggttctgacttgtagcgcactggaaaaacgtggaatcgatgagatctggcacgccatcatcgacttcaaaaccgcgctaactgccagtggtcgtttacaacaagtgcggcaacaacaatcggtggaatggctgcgtaagcagaccgaagaagaagtactgaatcacctgttcgcgaatgaagatttcgatcgctattaccgccagacgcttttagcggtcaaaaacaatacgctctcaccgcgcaccggcctgcggcagctcagtgaatttatccagacgcaatattttgattaa

SEQ ID NO: 38 - DNA, 786 bp, Artificial Sequence
  Synthetic
atgtcttatcagtatgttaacgttgtcactatcaacaaagtggcggtcattgagtttaactatggccgaaaacttaatgccttaagtaaagtctttattgatgatcttatgcaggcgttaagcgatctcaaccggccggaaattcgctgtatcattttgcgcgcaccgagtggatccaaagtcttctccgcaggtcacgatattcacgaactgccgtctggcggtcgcgatccgctctcctatgatgatccattgcgtcaaatcacccgcatgatccaaaaattcccgaaaccgatcatttcgatggtggaaggtagtgtttggggtggcgcatttgaaatgatcatgagttccgatctgatcatcgccgccagtacctcaaccttctcaatgacgcctgtaaacctcggcgtcccgtataacctggtcggcattcacaacctgacccgcgacgcgggcttccacattgtcaaagagctgatttttaccgcttcgccaatcaccgcccagcgcgcgctggctgtcggcatcctcaaccatgttgtggaagtggaagaactggaagatttcaccttacaaatggcgcaccacatctctgagaaagcgccgttagccattgccgttatcaaagaagagctgcgtgtactgggcgaagcacacaccatgaactccgatgaatttgaacgtattcaggggatgcgccgcgcggtgtatgacagcgaagattaccaggaagggatgaacgctttcctcgaaaaacgtaaacctaatttcgttggtcattaa

SEQ ID NO: 39 - DNA, 1479 bp, Artificial Sequence
  Synthetic
atggaaactcagtggacaaggatgaccgccaatgaagcggcagaaattatccagcataacgacatggtggcatttagcggctttaccccggcgggttcgccgaaagccctacccaccgcgattgcccgcagagctaacgaacagcatgaggccaaaaagccgtatcaaattcgccttctgacgggtgcgtcaatcagcgccgccgctgacgatgtactttctgacgccgatgctgtttcctggcgtgcgccatatcaaacatcgtccggtttacgtaaaaagatcaatcagggcgcggtgagtttcgttgacctgcatttgagcgaagtggcgcaaatggtcaattacggtttcttcggcgacattgatgttgccgtcattgaagcatcggcactggcaccggatggtcgagtctggttaaccagcgggatcggtaatgcgccgacctggctgctgcgggcgaagaaagtgatcattgaactcaatcactatcacgatccgcgcgttgcagaactggcggatattgtgattcctggcgcgccaccgcggcgcaatagcgtgtcgatcttccatgcaatggatcgcgtcggtacccgctatgtgcaaatcgatccgaaaaagattgtcgccgtcgtggaaaccaacttgcccgacgccggtaatatgctggataagcaaaatcccatgtgccagcagattgccgataacgtggtcacgttcttattgcaggaaatggcgcatgggcgtattccgccggaatttctgccgctgcaaagtggcgtgggcaatatcaataatgcggtaatggcgcgtctgggggaaaacccggtaattcctccgtttatgatgtattcggaagtgctacaggaatcggtggtgcatttactggaaaccggcaaaatcagcggggccagcgcctccagcctgacaatctcggccgattccctgcgcaagatttacgacaatatggattactttgccagccgcattgtgttgcgtccgcaggagatttccaataacccggaaatcatccgtcgtctgggcgtcatcgctctgaacgtcggcctggagtttgatatttacgggcatgccaactcaacacacgtagccggggtcgatctgatgaacggcatcggcggcagcggtgattttgaacgcaacgcgtatctgtcgatctttatggccccgtcgattgctaaagaaggcaagatctcaaccgtcgtgccaatgtgcagccatgttgatcacagcgaacacagcgtcaaagtgatcatcaccgaacaagggatcgccgatctgcgcggtctttccccgcttcaacgcgcccgcactatcattgataattgtgcacatcctatgtatcgggattatctgcatcgctatctggaaaatgcgcctggcggacatattcaccacgatcttagccacgtcttcgacttacaccgtaatttaattgcaaccggctcgatgctgggttaa

SEQ ID NO: 40 - DNA, 1917 bp, Artificial Sequence
  Synthetic
atgagcagcacggatcaggggaccaaccccgccgacactgacgacctcactcccaccacactcagtctggccggggatttccccaaggccactgaggagcagtgggagcgcgaagttgagaaggtattcaaccgtggtcgtccaccggagaagcagctgaccttcgccgagtgtctgaagcgcctgacggttcacaccgtcgatggcatcgacatcgtgccgatgtaccgtccgaaggacgcgccgaagaagctgggttaccccggcgtcacccccttcacccgcggcaccacggtgcgcaacggtgacatggatgcctgggacgtgcgcgccctgcacgaggatcccgacgagaagttcacccgcaaggcgatccttgaagacctggagcgtggcgtcacctccctgttgttgcgcgttgatcccgacgcgatcgcacccgagcacctcgacgaggtcctctccgacgtcctgctggaaatgaccaaggtggaggtcttcagccgctacgaccagggtgccgccgccgaggccttgatgggcgtctacgagcgctccgacaagccggcgaaggacctggccctgaacctgggcctggatcccatcggcttcgcggccctgcagggcaccgagccggatctgaccgtgctcggtgactgggtgcgccgcctggcgaagttctcaccggactcgcgcgccgtcacgatcgacgcgaacgtctaccacaacgccggtgccggcgacgtggcagagctcgcttgggcactggccaccggcgcggagtacgtgcgcgccctggtcgaacagggcttcaacgccacagaggccttcgacacgatcaacttccgtgtcaccgccacccacgaccagttcctcacgatcgcccgtcttcgcgccctgcgcgaggcatgggcccgcatcggcgaggtctttggcgtggacgaggacaagcgcggcgctcgccagaatgcgatcaccagttggcgtgagctcacccgcgaagacccctatgtcaacatccttcgcggttcgattgccaccttctccgcctccgttggcggggccgagtcgatcacgacgctgcccttcacccaggccctcggcctgccggaggacgacttcccgctgcgcatcgcgcgcaacacgggcatcgtgctcgccgaagaggtgaacatcggccgcgtcaacgacccggccggtggctcctactacgtcgagtcgctcactcgcaccctggccgacgctgcctggaaggaattccaggaggtcgagaagctcggtggcatgtcgaaggcggtcatgaccgagcacgtcaccaaggtgctcgacgcctgcaatgccgagcgcgccaagcgcctggccaaccgcaagcagccgatcaccgcggtcagcgagttcccgatgatcggggcccgcagcatcgagaccaagccgttcccaaccgctccggcgcgcaagggcctggcctggcatcgcgattccgaggtgttcgagcagctgatggatcgctccaccagcgtctccgagcgccccaaggtgttccttgcctgcctgggcacccgtcgcgacttcggtggccgcgagggcttctccagcccggtatggcacatcgccggtatcgacaccccgcaggtcgaaggcggcaccaccgccgagatcgtcgaggcgttcaagaagtcgggcgcccaggtggccgatctctgctcgtccgccaagatctacgcgcagcagggacttgaggttgccaaggcgctcaaggccgccggcgcgaaggccctgtatctgtcgggcgccttcaaggagttcggcgatgacgccgccgaggccgagaagctgatcgacggacgcctgtacatgggcatggatgtcgtcgacaccctgtcctccacccttgatatcttgggagtcgcgaagtga

SEQ ID NO: 41 - DNA, 2187 bp, Artificial Sequence
  Synthetic
gtgagcactctgccccgttttgattcagttgacctgggcaatgccccggttcctgctgatgccgcacagcgcttcgaggagttggccgccaaggccggcaccgaagaggcgtgggagacggctgagcagattccggttggcaccctgttcaacgaagacgtctacaaggacatggactggctggacacctacgccggtatcccgccgttcgtccacggcccatatgcaaccatgtacgcgttccgtccctggacgattcgccagtacgccggcttctccacggccaaggagtccaacgccttctaccgccgcaaccttgcggcgggccagaagggcctgtcggttgccttcgacctgcccacccaccgcggctacgactcggacaatccccgcgtcgccggtgacgtcggcatggccggggtggccatcgactccatctatgacatgcgcgagctgttcgccggcattccgctggaccagatgagcgtgtcgatgaccatgaacggcgccgtgctgccgatcctggccctctatgtggtgaccgccgaggagcagggcgtcaagcccgagcagctcgccgggacgatccagaacgacatcctcaaggagttcatggttcgtaacacctatatctacccgccgcagccgagtatgcgaatcatctccgagatcttcgcctacacgagtgccaatatgccgaagtggaattcgatttccatttccggctaccacatgcaggaagccggcgccacggccgacatcgagatggcctacaccctggccgacggtgtcgactacatccgcgccggcgagtcggtgggcctcaatgtcgaccagttcgcgccgcgtctgtccttcttctggggcatcggcatgaacttcttcatggaggttgccaagctgcgtgccgcacgtatgttgtgggccaagctggtgcatcagttcgggccgaagaatccgaagtcgatgagcctgcgcacccactcgcagacctccggttggtcgctgaccgcccaggacgtctacaacaacgtcgtgcgtacctgcatcgaggccatggccgccacccagggccatacccagtcgctgcacacgaactcgctcgacgaggccattgccctaccgaccgatttcagcgcccgcatcgcccgtaacacccagctgttcctgcagcaggaatcgggcacgacgcgcgtgatcgacccgtggagcggctcggcatacgtcgaggagctcacctgggacctggcccgcaaggcatggggccacatccaggaggtcgagaaggtcggcggcatggccaaggccatcgaaaagggcatccccaagatgcgcattgaggaagccgccgcccgcacccaggcacgcatcgactccggccgtcagccgctgatcggcgtgaacaagtaccgcctggagcacgagccgccgctcgatgtgctcaaggttgacaactccacggtgctcgccgagcagaaggccaagctggtcaagctgcgcgccgagcgcgatcccgagaaggtcaaggccgccctcgacaagatcacctgggctgccgccaaccccgacgacaaggatccggatcgcaacctgctgaagctgtgcatcgacgctggccgcgccatggcgacggtcggcgagatgagcgacgcgctcgagaaggtcttcggacgctacaccgcccagattcgcaccatctccggtgtgtactcgaaggaagtgaagaacacgcctgaggttgaggaagcacgcgagctcgttgaggaattcgagcaggccgagggccgtcgtcctcgcatcctgctggccaagatgggccaggacggtcacgaccgtggccagaaggtcatcgccaccgcctatgccgacctcggtttcgacgtcgacgtgggcccgctgttccagaccccggaggagaccgcacgtcaggccgtcgaggccgatgtgcacgtggtgggcgtttcgtcgctcgccggcgggcatctgacgctggttccggccctgcgcaaggagctggacaagctcggacgtcccgacatcctcatcaccgtgggcggcgtgatccctgagcaggacttcgacgagctgcgtaaggacggcgccgtggagatctacacccccggcaccgtcattccggagtcggcgatctcgctggtcaagaaactgcgggcttcgctcgatgcctag

SEQ ID NO: 42 - DNA, 447 bp, Artificial Sequence
  Synthetic
atgagtaatgaggatcttttcatctgtatcgatcacgtggcatatgcgtgccccgacgccgacgaggcttccaagtactaccaggagaccttcggctggcatgagctccaccgcgaggagaacccggagcagggagtcgtcgagatcatgatggccccggctgcgaagctgaccgagcacatgacccaggttcaggtcatggccccgctcaacgacgagtcgaccgttgccaagtggcttgccaagcacaatggtcgcgccggactgcaccacatggcatggcgtgtcgatgacatcgacgccgtcagcgccaccctgcgcgagcgcggcgtgcagctgctgtatgacgagcccaagctcggcaccggcggcaaccgcatcaacttcatgcatcccaagtcgggcaagggcgtgctcatcgagctcacccagtacccgaagaactga

SEQ ID NO: 43 - DNA, 1575 bp, Artificial Sequence
  Synthetic
atggctgaaaacaacaatttgaagctcgccagcaccatggaaggtcgcgtggagcagctcgcagagcagcgccaggtgatcgaagccggtggcggcgaacgtcgcgtcgagaagcaacattcccagggtaagcagaccgctcgtgagcgcctgaacaacctgctcgatccccattcgttcgacgaggtcggcgctttccgcaagcaccgcaccacgttgttcggcatggacaaggccgtcgtcccggcagatggcgtggtcaccggccgtggcaccatccttggtcgtcccgtgcacgccgcgtcccaggacttcacggtcatgggtggttcggctggcgagacgcagtccacgaaggtcgtcgagacgatggaacaggcgctgctcaccggcacgcccttcctgttcttctacgattcgggcggcgcccggatccaggagggcatcgactcgctgagcggttacggcaagatgttcttcgccaacgtgaagctgtcgggcgtcgtgccgcagatcgccatcattgccggcccctgtgccggtggcgcctcgtattcgccggcactgactgacttcatcatcatgaccaagaaggcccatatgttcatcacgggcccccaggtcatcaagtcggtcaccggcgaggatgtcaccgctgacgaactcggtggcgctgaggcccatatggccatctcgggcaatatccacttcgtggccgaggacgacgacgccgcggagctcattgccaagaagctgctgagcttccttccgcagaacaacactgaggaagcatccttcgtcaacccgaacaatgacgtcagccccaataccgagctgcgcgacatcgttccgattgacggcaagaagggctatgacgtgcgcgatgtcattgccaagatcgtcgactggggtgactacctcgaggtcaaggccggctatgccaccaacctcgtgaccgccttcgcccgggtcaatggtcgttcggtgggcatcgtggccaatcagccgtcggtgatgtcgggttgcctcgacatcaacgcctctgacaaggccgccgaattcgtgaatttctgcgattcgttcaacatcccgctggtgcagctggtcgacgtgccgggcttcctgcccggcgtgcagcaggagtacggcggcatcattcgccatggcgcgaagatgctgtacgcctactccgaggccaccgtgccgaagatcaccgtggtgctccgcaaggcctacggcggctcctacctggccatgtgcaaccgtgaccttggtgccgacgccgtgtacgcctggcccagcgccgagattgcggtgatgggcgccgagggtgcggcaaatgtgatcttccgcaaggagatcaaggctgccgacgatcccgacgccatgcgcgccgagaagatcgaggagtaccagaacgcgttcaacacgccgtacgtggccgccgcccgcggtcaggtcgacgacgtgattgacccggctgatacccgtcgaaagattgcttccgccctggagatgtacgccaccaagcgtcagacccgcccggcgaagaagcatggaaacttcccctgctga

SEQ ID NO: 44 - DNA, 1518 bp, Artificial Sequence
  Synthetic
atgagtccgcgagaaattgaggtttccgagccgcgcgaggttggtatcaccgagctcgtgctgcgcgatgcccatcagagcctgatggccacacgaatggcaatggaagacatggtcggcgcctgtgcagacattgatgctgccgggtactggtcagtggagtgttggggtggtgccacgtatgactcgtgtatccgcttcctcaacgaggatccttgggagcgtctgcgcacgttccgcaagctgatgcccaacagccgtctccagatgctgctgcgtggccagaacctgctgggttaccgccactacaacgacgaggtcgtcgatcgcttcgtcgacaagtccgctgagaacggcatggacgtgttccgtgtcttcgacgccatgaatgatccccgcaacatggcgcacgccatggctgccgtcaagaaggccggcaagcacgcgcagggcaccatttgctacacgatcagcccggtccacaccgttgagggctatgtcaagcttgctggtcagctgctcgacatgggtgctgattccatcgccctgaaggacatggccgccctgctcaagccgcagccggcctacgacatcatcaaggccatcaaggacacctacggccagaagacgcagatcaacctgcactgccactccaccacgggtgtcaccgaggtctccctcatgaaggccatcgaggccggcgtcgacgtcgtcgacaccgccatctcgtccatgtcgctcggcccgggccacaaccccaccgagtcggttgccgagatgctcgagggcaccgggtacaccaccaaccttgactacgatcgcctgcacaagatccgcgatcacttcaaggccatccgcccgaagtacaagaagttcgagtcgaagacgcttgtcgacacctcgatcttcaagtcgcagatccccggcggcatgctctccaacatggagtcgcagctgcgcgcccagggcgccgaggacaagatggacgaggtcatggcagaggtgccgcgcgtccgcaaggccgccggcttcccgcccctggtcaccccgtccagccagatcgtcggcacgcaggccgtgttcaacgtgatgatgggcgagtacaagaggatgaccggcgagttcgccgacatcatgctcggctactacggcgccagcccggccgatcgcgatccgaaggtggtcaagttggccgaggagcagtccggcaagaagccgatcacccagcgcccggccgatctgctgccccccgagtgggaggagcagtccaaggaggccgcggccctcaagggcttcaacggcaccgacgaggacgtgctcacctatgcactgttcccgcaggtcgctccggtcttcttcgagcatcgcgccgagggcccgcacagcgtggctctcaccgatgcccagctgaaggccgaggccgagggcgacgagaagtcgctcgccgtggccggtcccgtcacctacaacgtgaacgtgggcggaaccgtccgcgaagtcaccgttcagcaggcgtga

SEQ ID NO: 45 - DNA, 372 bp, Artificial Sequence
  Synthetic
atgaaactgaaggtaacagtcaacggcactgcgtatgacgttgacgttgacgtcgacaagtcacacgaaaacccgatgggcaccatcctgttcggcggcggcaccggcggcgcgccggcaccgcgcgcagcaggtggcgcaggcgccggtaaggccggagagggcgagattcccgctccgctggccggcaccgtctccaagatcctcgtgaaggagggtgacacggtcaaggctggtcagaccgtgctcgttctcgaggccatgaagatggagaccgagatcaacgctcccaccgacggcaaggtcgagaaggtccttgtcaaggagcgtgacgccgtgcagggcggtcagggtctcatcaagatcggctga

SEQ ID NO: 46 - protein, 524 aa, Artificial Sequence
  Synthetic
MRKVPIITADEAAKLIKDGDTVTTSGFVGNAIPEALDRAVEKRFLETGEPKNITYVYCGSQGNRDGRGAEHFAHEGLLKRYIAGHWATVPALGKMAMENKMEAYNVSQGALCHLFRDIASHKPGVFTKVGIGTFIDPRNGGGKVNDITKEDIVELVEIKGQEYLFYPAFPIHVALIRGTYADESGNITFEKEVAPLEGTSVCQAVKNSGGIVVVQVERVVKAGTLDPRHVKVPGIYVDYVVVADPEDHQQSLDCEYDPALSGEHRRPEVVGEPLPLSAKKVIGRRGAIELEKDVAVNLGVGAPEYVASVADEEGIVDFMTLTAESGAIGGVPAGGVRFGASYNADALIDQGYQFDYYDGGGLDLCYLGLAECDEKGNINVSRFGPRIAGCGGFINITQNTPKVFFCGTFTAGGLKVKIEDGKVIIVQEGKQKKFLKAVEQITFNGDVALANKQQVTYITERCVFLLKEDGLHLSEIAPGIDLQTQILDVMDFAPIIDRDANGQIKLMDAALFAEGLMGLKEMKS

SEQ ID NO: 47 - protein, 422 aa, Artificial Sequence
  Synthetic
MSLTQGMKAKQLLAYFQGKADQDAREAKARGELVCWSASVAPPEFCVTMGIAMIYPETHAAGIGARKGAMDMLEVADRKGYNVDCCSYGRVNMGYMECLKEAAITGVKPEVLVNSPAADVPLPDLVITCNNICNTLLKWYENLAAELDIPCIVIDVPFNHTMPIPEYAKAYIADQFRNAISQLEVICGRPFDWKKFKEVKDQTQRSVYHWNRIAEMAKYKPSPLNGFDLFNYMALIVACRSLDYAEITFKAFADELEENLKAGIYAFKGAEKTRFQWEGIAVWPHLGHTFKSMKNLNSIMTGTAYPALWDLHYDANDESMHSMAEAYTRIYINTCLQNKVEVLLGIMEKGQVDGTVYHLNRSCKLMSFLNVETAEIIKEKNGLPYVSIDGDQTDPRVFSPAQFDTRVQALVEMMEANMAAAE

SEQ ID NO: 48 - protein, 374 aa, Artificial Sequence
  Synthetic
MSRVEAILSQLKDVAANPKKAMDDYKAETGKGAVGIMPIYSPEEMVHAAGYLPMGIWGAQGKTISKARTYLPAFACSVMQQVMELQCEGAYDDLSAVIFSVPCDTLKCLSQKWKGTSPVIVFTHPQNRGLEAANQFLVTEYELVKAQLESVLGVKISNAALENSIAIYNENRAVMREFVKVAADYPQVIDAVSRHAVFKARQFMLKEKHTALVKELIAEIKATPVQPWDGKKVVVTGILLEPNELLDIFNEFKIAIVDDDLAQESRQIRVDVLDGEGGPLYRMAKAWQQMYGCSLATDTKKGRGRMLINKTIQTGADAIVVAMMKFCDPEEWDYPVMYREFEEKGVKSLMIEVDQEVSSFEQIKTRLQSFVEML

SEQ ID NO: 49 - protein, 260 aa, Artificial Sequence
  Synthetic
  misc_feature (260)..(260): Xaa can be any naturally occurring amino acid
MYTLGIDVGSASSKAVILKDGKDIVAAEVVQVGTGSSGPQRALDKAFEVSGLKKEDISYTVATGYGRFNFSDADKQISEISCHAKGIYFLVPTARTIIDIGGQDAKAIRLDDKGGIKQFFMNDKCAAGTGRFLEVMARVLETTLDEMAELDEQATDTAPISSTCTVFAESEVISQLSNGVSRNNIIKGVHLSVASRACGLAYRGGLEKDVVMTGGVAKNAGVVRAVAGVLKTDVIVAPNPQTTGALGAALYAYEAAQKKX

SEQ ID NO: 50 - protein, 367 aa, Artificial Sequence
  Synthetic
MAFNSADINSFRDIWVFCEQREGKLINTDFELISEGRKLADERGSKLVGILLGHEVEEIAKELGGYGADKVIVCDHPELKFYTTDAYAKVLCDVVMEEKPEVILIGATNIGRDLGPRCAARLHTGLTADCTHLDIDMNKYVDFLSTSSTLDISSMTFPMEDTNLKMTRPAFGGHLMATIICPRFRPCMSTVRPGVMKKAEFSQEMAQACQVVTRHVNLSDEDLKTKVINIVKETKKIVDLIGAEIIVSVGRGISKDVQGGIALAEKLADAFGNGVVGGSRAVIDSGWLPADHQVGQTGKTVHPKVYVALGISGAIQHKAGMQDSELIIAVNKDETAPIFDCADYGITGDLFKIVPMMIDAIKEGKNA

SEQ ID NO: 51 - protein, 267 aa, Artificial Sequence
  Synthetic
MRIYVCVKQVPDTSGKVAVNPDGTLNRASMAAIINPDDMSAIEQALKLKDETGCQVTALTMGPPPAEGMLREIIAMGADDGVLISAREFGGSDTFATSQIISAAIHKLGLSNEDMIFCGRQAIDGDTAQVGPQIAEKLSIPQVTYGAGIKKSGDLVLVKRMLEDGYMMIEVETPCLITCIQDKAVKPRYMTLNGIMECYSKPLLVLDYEALKDEPLIELDTIGLKGSPTNIFKSFTPPQKGVGVMLQGTDKEKVEDLVDKLMQKHVI

SEQ ID NO: 52 - protein, 394 aa, Artificial Sequence
  Synthetic
MFLLKIKKERMKRMDFSLTREQEMLKKLARQFAEIELEPVAEEIDREHVFPAENFKKMAEIGLTGIGIPKEFGGSGGGTLEKVIAVSEFGKKCMASASILSIHLIAPQAIYKYGTKEQKETYLPRLTKGGELGAFALTEPNAGSDAGAVKTTAILDSQTNEYVLNGTKCFISGGGRAGVLVIFALTEPKKGLKGMSAIIVEKGTPGFSIGKVESKMGIAGSETAELIFEDCRVPAANLLGKEGKGFKIAMEALDGARIGVGAQAIGIAEGAIDLSVKYVHERIQFGKPIANLQGIQWYIADMATKTAAARALVEFAAYLEDAGKPFTKESAMCKLNASENARFVTNLALQIHGGYGYMKDYPLERMYRDAKITEIYEGTSEIHKVVIAREVMKR

SEQ ID NO: 53 - protein, 820 aa, Artificial Sequence
  Synthetic
MRVLKFGGTSVANAERFLRVADILESNARQGQVATVLSAPAKITNHLVAMIEKTISGQDALPNISDAERIFAELLTGLAAAQPGFPLAQLKTFVDQEFAQIKHVLHGISLLGQCPDSINAALICRGEKMSIAIMAGVLEARGHNVTVIDPVEKLLAVGHYLESTVDIAESTRRIAASRIPADHMVLMAGFTAGNEKGELVVLGRNGSDYSAAVLAACLRADCCEIWTDVDGVYTCDPRQVPDARLLKSMSYQEAMELSYFGAKVLHPRTITPIAQFQIPCLIKNTGNPQAPGTLIGASRDEDELPVKGISNLNNMAMFSVSGPGMKGMVGMAARVFAAMSRARISVVLITQSSSEYSISFCVPQSDCVRAERAMQEEFYLELKEGLLEPLAVTERLAIISVVGDGMRTLRGISAKFFAALARANINIVAIAQRSSERSISVVVNNDDATTGVRVTHQMLFNTDQVIEVFVIGVGGVGGALLEQLKRQQSWLKNKHIDLRVCGVANSKALLTNVHGLNLENWQEELAQAKEPFNLGRLIRLVKEYHLLNPVIVDCTSSQAVADQYADFLREGFHVVTPNKKANTSSMDYYHQLRYAAEKSRRKFLYDTNVGAGLPVIENLQNLLNAGDELMKFSGILSGSLSYIFGKLDEGMSFSEATTLAREMGYTEPDPRDDLSGMDVARKLLILARETGRELELADIEIEPVLPAEFNAEGDVAAFMANLSQLDDLFAARVAKARDEGKVLRYVGNIDEDGVCRVKIAEVDGNDPLFKVKNGENALAFYSHYYQPLPLVLRGYGAGNDVTAAGVFADLLRTLSWKLGV

SEQ ID NO: 54 - protein, 310 aa, Artificial Sequence
  Synthetic
MVKVYAPASSANMSVGFDVLGAAVTPVDGALLGDVVTVEAAETFSLNNLGRFADKLPSEPRENIVYQCWERFCQELGKQIPVAMTLEKNMPIGSGLGSSACSVVAALMAMNEHCGKPLNDTRLLALMGELEGRISGSIHYDNVAPCFLGGMQLMIEENDIISQQVPGFDEWLWVLAYPGIKVSTAEARAILPAQYRRQDCIAHGRHLAGFIHACYSRQPELAAKLMKDVIAEPYRERLLPGFRQARQAVAEIGAVASGISGSGPTLFALCDKPETAQRVADWLGKNYLQNQEGFVHICRLDTAGARVLEN

SEQ ID NO: 55 - protein, 428 aa, Artificial Sequence
  Synthetic
MKLYNLKDHNEQVSFAQAVTQGLGKNQGLFFPHDLPEFSLTEIDEMLKLDFVTRSAKILSAFIGDEIPQEILEERVRAAFAFPAPVANVESDVGCLELFHGPTLAFKDFGGRFMAQMLTHIAGDKPVTILTATSGDTGAAVAHAFYGLPNVKVVILYPRGKISPLQEKLFCTLGGNIETVAIDGDFDACQALVKQAFDDEELKVALGLNSANSINISRLLAQICYYFEAVAQLPQETRNQLVVSVPSGNFGDLTAGLLAKSLGLPVKRFIAATNVNDTVPRFLHDGQWSPKATQATLSNAMDVSQPNNWPRVEELFRRKIWQLKELGYAAVDDETTQQTMRELKELGYTSEPHAAVAYRALRDQLNPGEYGLFLGTAHPAKFKESVEAILGETLDLPKELAERADLPLLSHNLPADFAALRKLMMNHQ

SEQ ID NO: 56 - protein, 436 aa, Artificial Sequence
  Synthetic
MSETYVSEKSPGVMASGAELIRAADIQTAQARISSVIAPTPLQYCPRLSEETGAEIYLKREDLQDVRSYKIRGALNSGAQLTQEQRDAGIVAASAGNHAQGVAYVCKSLGVQGRIYVPVQTPKQKRDRIMVHGGEFVSLVVTGNNFDEASAAAHEDAERTGATLIEPFDARNTVIGQGTVAAEILSQLTSMGKSADHVMVPVGGGGLLAGVVSYMADMAPRTAIVGIEPAGAASMQAALHNGGPITLETVDPFVDGAAVKRVGDLNYTIVEKNQGRVHMMSATEGAVCTEMLDLYQNEGIIAEPAGALSIAGLKEMSFAPGSAVVCIISGGNNDVLRYAEIAERSLVHRGLKHYFLVNFPQKPGQLRHFLEDILGPDDDITLFEYLKRNNRETGTALVGIHLSEASGLDSLLERMEESAIDSRRLEPGTPEYEYLT

SEQ ID NO: 57 - protein, 887 aa, Artificial Sequence
  Synthetic
MSERFPNDVDPIETRDWLQAIESVIREEGVERAQYLIDQLLAEARKGGVNVAAGTGISNYINTIPVEEQPEYPGNLELERRIRSAIRWNAIMTVLRASKKDLELGGHMASFQSSATIYDVCFNHFFRARNEQDGGDLVYFQGHISPGVYARAFLEGRLTQEQLDNFRQEVHGNGLSSYPHPKLMPEFWQFPTVSMGLGPIGAIYQAKFLKYLEHRGLKDTSKQTVYAFLGDGEMDEPESKGAITIATREKLDNLVFVINCNLQRLDGPVTGNGKIINELEGIFEGAGWNVIKVMWGSRWDELLRKDTSGKLIQLMNETVDGDYQTFKSKDGAYVREHFFGKYPETAALVADWTDEQIWALNRGGHDPKKIYAAFKKAQETKGKATVILAHTIKGYGMGDAAEGKNIAHQVKKMNMDGVRHIRDRFNVPVSDADIEKLPYITFPEGSEEHTYLHAQRQKLHGYLPSRQPNFTEKLELPSLQDFGALLEEQSKEISTTIAFVRALNVMLKNKSIKDRLVPIIADEARTFGMEGLFRQIGIYSPNGQQYTPQDREQVAYYKEDEKGQILQEGINELGAGCSWLAAATSYSTNNLPMIPFYIYYSMFGFQRIGDLCWAAGDQQARGFLIGGTSGRTTLNGEGLQHEDGHSHIQSLTIPNCISYDPAYAYEVAVIMHDGLERMYGEKQENVYYYITTLNENYHMPAMPEGAEEGIRKGIYKLETIEGSKGKVQLLGSGSILRHVREAAEILAKDYGVGSDVYSVTSFTELARDGQDCERWNMLHPLETPRVPYIAQVMNDAPAVASTDYMKLFAEQVRTYVPADDYRVLGTDGFGRSDSRENLRHHFEVDASYVVVAALGELAKRGEIDKKVVADAIAKFNIDADKVNPRLA

SEQ ID NO: 58 - protein, 630 aa, Artificial Sequence
  Synthetic
MAIEIKVPDIGADEVEITEILVKVGDKVEAEQSLITVEGDKASMEVPSPQAGIVKEIKVSVGDKTQTGALIMIFDSADGAADAAPAQAEEKKEAAPAAAPAAAAAKDVNVPDIGSDEVEVTEILVKVGDKVEAEQSLITVEGDKASMEVPAPFAGTVKEIKVNVGDKVSTGSLIMVFEVAGEAGAAAPAAKQEAAPAAAPAPAAGVKEVNVPDIGGDEVEVTEVMVKVGDKVAAEQSLITVEGDKASMEVPAPFAGVVKELKVNVGDKVKTGSLIMIFEVEGAAPAAAPAKQEAAAPAPAAKAEAPAAAPAAKAEGKSEFAENDAYVHATPLIRRLAREFGVNLAKVKGTGRKGRILREDVQAYVKEAIKRAEAAPAATGGGIPGMLPWPKVDFSKFGEIEEVELGRIQKISGANLSRNWVMIPHVTHFDKTDITELEAFRKQQNEEAAKRKLDVKITPVVFIMKAVAAALEQMPRFNSSLSEDGQRLTLKKYINIGVAVDTPNGLVVPVFKDVNKKGIIELSRELMTISKKARDGKLTAGEMQGGCFTISSIGGLGTTHFAPIVNAPEVAILGVSKSAMEPVWNGKEFVPRLMLPISLSFDHRVIDGADGARFITIINNTLSDIRRLVM

SEQ ID NO: 59 - protein, 474 aa, Artificial Sequence
  Synthetic
MSTEIKTQVVVLGAGPAGYSAAFRCADLGLETVIVERYNTLGGVCLNVGCIPSKALLHVAKVIEEAKALAEHGIVFGEPKTDIDKIRTWKEKVINQLTGGLAGMAKGRKVKVVNGLGKFTGANTLEVEGENGKTVINFDNAIIAAGSRPIQLPFIPHEDPRIWDSTDALELKEVPERLLVMGGGIIGLEMGTVYHALGSQIDVVEMFDQVIPAADKDIVKVFTKRISKKFNLMLETKVTAVEAKEDGIYVTMEGKKAPAEPQRYDAVLVAIGRVPNGKNLDAGKAGVEVDDRGFIRVDKQLRTNVPHIFAIGDIVGQPMLAHKGVHEGHVAAEVIAGKKHYFDPKVIPSIAYTKPEVAWVGLTEKEAKEKGISYETATFPWAASGRAIASDCADGMTKLIFDKESHRVIGGAIVGTNGGELLGEIGLAIEMGCDAEDIALTIHAHPTLHESVGLAAEVFEGSITDLPNPKAKKK

SEQ ID NO: 60 - protein, 326 aa, Artificial Sequence
  Synthetic
MRAVLIEKSDDTQSVSVTELAEDQLPEGDVLVDVAYSTLNYKDALAITGKAPVVRRFPMVPGIDFTGTVAQSSHADFKPGDRVILNGWGVGEKHWGGLAERARVRGDWLVPLPAPLDLRQAAMIGTAGYTAMLCVLALERHGVVPGNGEIVVSGAAGGVGSVATTLLAAKGYEVAAVTGRASEAEYLRGLGAASVIDRNELTGKVRPLGQERWAGGIDVAGSTVLANMLSMMKYRGVVAACGLAAGMDLPASVAPFILRGMTLAGVDSVMCPKTDRLAAWARLASDLDPAKLEEMTTELPFSEVIETAPKFLDGTVRGRIVIPVTP

SEQ ID NO: 61 - protein, 714 aa, Artificial Sequence
  Synthetic
MSNVQEWQQLANKELSRREKTVDSLVHQTAEGIAIKPLYTEADLDNLEVTGTLPGLPPYVRGPRATMYTAQPWTIRQYAGFSTAKESNAFYRRNLAAGQKGLSVAFDLATHRGYDSDNPRVAGDVGKAGVAIDTVEDMKVLFDQIPLDKMSVSMTMNGAVLPVLAFYIVAAEEQGVTPDKLTGTIQNDILKEYLCRNTYIYPPKPSMRIIADIIAWCSGNMPRFNTISISGYHMGEAGANCVQQVAFTLADGIEYIKAAISAGLKIDDFAPRLSFFFGIGMDLFMNVAMLRAARYLWSEAVSGFGAQDPKSLALRTHCQTSGWSLTEQDPYNNVIRTTIEALAATLGGTQSLHTNAFDEALGLPTDFSARIARNTQIIIQEESELCRTVDPLAGSYYIESLTDQIVKQARAIIQQIDEAGGMAKAIEAGLPKRMIEEASAREQSLIDQGKRVIVGVNKYKLDHEDETDVLEIDNVMVRNEQIASLERIRATRDDAAVTAALNALTHAAQHNENLLAAAVNAARVRATLGEISDALEVAFDRYLVPSQCVTGVIAQSYHQSEKSASEFDAIVAQTEQFLADNGRRPRILIAKMGQDGHDRGAKVIASAYSDLGFDVDLSPMFSTPEEIARLAVENDVHVVGASSLAAGHKTLIPELVEALKKWGREDICVVAGGVIPPQDYAFLQERGVAAIYGPGTPMLDSVRDVLNLISQHHD

SEQ ID NO: 62 - protein, 331 aa, Artificial Sequence
  Synthetic
MINEATLAESIRRLRQGERATLAQAMTLVESRHPRHQALSTQLLDAIMPYCGNTLRLGVTGTPGAGKSTFLEAFGMLLIREGLKVAVIAVDPSSPVTGGSILGDKTRMNDLARAEAAFIRPVPSSGHLGGASQRARELMLLCEAAGYDVVIVETVGVGQSETEVARMVDCFISLQIAGGGDDLQGIKKGLMEVADLIVINKDDGDNHTNVAIARHMYESALHILRRKYDEWQPRVLTCSALEKRGIDEIWHAIIDFKTALTASGRLQQVRQQQSVEWLRKQTEEEVLNHLFANEDFDRYYRQTLLAVKNNTLSPRTGLRQLSEFIQTQYFD

SEQ ID NO: 63 - protein, 261 aa, Artificial Sequence
  Synthetic
MSYQYVNVVTINKVAVIEFNYGRKLNALSKVFIDDLMQALSDLNRPEIRCIILRAPSGSKVFSAGHDIHELPSGGRDPLSYDDPLRQITRMIQKFPKPIISMVEGSVWGGAFEMIMSSDLIIAASTSTFSMTPVNLGVPYNLVGIHNLTRDAGFHIVKELIFTASPITAQRALAVGILNHVVEVEELEDFTLQMAHHISEKAPLAIAVIKEELRVLGEAHTMNSDEFERIQGMRRAVYDSEDYQEGMNAFLEKRKPNFVGH

SEQ ID NO: 64 - protein, 492 aa, Artificial Sequence
  Synthetic
METQWTRMTANEAAEIIQHNDMVAFSGFTPAGSPKALPTAIARRANEQHEAKKPYQIRLLTGASISAAADDVLSDADAVSWRAPYQTSSGLRKKINQGAVSFVDLHLSEVAQMVNYGFFGDIDVAVIEASALAPDGRVWLTSGIGNAPTWLLRAKKVIIELNHYHDPRVAELADIVIPGAPPRRNSVSIFHAMDRVGTRYVQIDPKKIVAVVETNLPDAGNMLDKQNPMCQQIADNVVTFLLQEMAHGRIPPEFLPLQSGVGNINNAVMARLGENPVIPPFMMYSEVLQESVVHLLETGKISGASASSLTISADSLRKIYDNMDYFASRIVLRPQEISNNPEIIRRLGVIALNVGLEFDIYGHANSTHVAGVDLMNGIGGSGDFERNAYLSIFMAPSIAKEGKISTVVPMCSHVDHSEHSVKVIITEQGIADLRGLSPLQRARTIIDNCAHPMYRDYLHRYLENAPGGHIHHDLSHVFDLHRNLIATGSMLG

SEQ ID NO: 65 - protein, 638 aa, Artificial Sequence
  Synthetic
MSSTDQGTNPADTDDLTPTTLSLAGDFPKATEEQWEREVEKVFNRGRPPEKQLTFAECLKRLTVHTVDGIDIVPMYRPKDAPKKLGYPGVTPFTRGTTVRNGDMDAWDVRALHEDPDEKFTRKAILEDLERGVTSLLLRVDPDAIAPEHLDEVLSDVLLEMTKVEVFSRYDQGAAAEALMGVYERSDKPAKDLALNLGLDPIGFAALQGTEPDLTVLGDWVRRLAKFSPDSRAVTIDANVYHNAGAGDVAELAWALATGAEYVRALVEQGFNATEAFDTINFRVTATHDQFLTIARLRALREAWARIGEVFGVDEDKRGARQNAITSWRELTREDPYVNILRGSIATFSASVGGAESITTLPFTQALGLPEDDFPLRIARNTGIVLAEEVNIGRVNDPAGGSYYVESLTRTLADAAWKEFQEVEKLGGMSKAVMTEHVTKVLDACNAERAKRLANRKQPITAVSEFPMIGARSIETKPFPTAPARKGLAWHRDSEVFEQLMDRSTSVSERPKVFLACLGTRRDFGGREGFSSPVWHIAGIDTPQVEGGTTAEIVEAFKKSGAQVADLCSSAKIYAQQGLEVAKALKAAGAKALYLSGAFKEFGDDAAEAEKLIDGRLYMGMDVVDTLSSTLDILGVAK

SEQ ID NO: 66 - protein, 728 aa, Artificial Sequence
  Synthetic
VSTLPRFDSVDLGNAPVPADAAQRFEELAAKAGTEEAWETAEQIPVGTLFNEDVYKDMDWLDTYAGIPPFVHGPYATMYAFRPWTIRQYAGFSTAKESNAFYRRNLAAGQKGLSVAFDLPTHRGYDSDNPRVAGDVGMAGVAIDSIYDMRELFAGIPLDQMSVSMTMNGAVLPILALYVVTAEEQGVKPEQLAGTIQNDILKEFMVRNTYIYPPQPSMRIISEIFAYTSANMPKWNSISISGYHMQEAGATADIEMAYTLADGVDYIRAGESVGLNVDQFAPRLSFFWGIGMNFFMEVAKLRAARMLWAKLVHQFGPKNPKSMSLRTHSQTSGWSLTAQDVYNNVVRTCIEAMAATQGHTQSLHTNSLDEAIALPTDFSARIARNTQLFLQQESGTTRVIDPWSGSAYVEELTWDLARKAWGHIQEVEKVGGMAKAIEKGIPKMRIEEAAARTQARIDSGRQPLIGVNKYRLEHEPPLDVLKVDNSTVLAEQKAKLVKLRAERDPEKVKAALDKITWAAANPDDKDPDRNLLKLCIDAGRAMATVGEMSDALEKVFGRYTAQIRTISGVYSKEVKNTPEVEEARELVEEFEQAEGRRPRILLAKMGQDGHDRGQKVIATAYADLGFDVDVGPLFQTPEETARQAVEADVHVVGVSSLAGGHLTLVPALRKELDKLGRPDILITVGGVIPEQDFDELRKDGAVEIYTPGTVIPESAISLVKKLRASLDA

SEQ ID NO: 67 - protein, 148 aa, Artificial Sequence
  Synthetic
MSNEDLFICIDHVAYACPDADEASKYYQETFGWHELHREENPEQGVVEIMMAPAAKLTEHMTQVQVMAPLNDESTVAKWLAKHNGRAGLHHMAWRVDDIDAVSATLRERGVQLLYDEPKLGTGGNRINFMHPKSGKGVLIELTQYPKN

SEQ ID NO: 68 - protein, 524 aa, Artificial Sequence
  Synthetic
MAENNNLKLASTMEGRVEQLAEQRQVIEAGGGERRVEKQHSQGKQTARERLNNLLDPHSFDEVGAFRKHRTTLFGMDKAVVPADGVVTGRGTILGRPVHAASQDFTVMGGSAGETQSTKVVETMEQALLTGTPFLFFYDSGGARIQEGIDSLSGYGKMFFANVKLSGVVPQIAIIAGPCAGGASYSPALTDFIIMTKKAHMFITGPQVIKSVTGEDVTADELGGAEAHMAISGNIHFVAEDDDAAELIAKKLLSFLPQNNTEEASFVNPNNDVSPNTELRDIVPIDGKKGYDVRDVIAKIVDWGDYLEVKAGYATNLVTAFARVNGRSVGIVANQPSVMSGCLDINASDKAAEFVNFCDSFNIPLVQLVDVPGFLPGVQQEYGGIIRHGAKMLYAYSEATVPKITVVLRKAYGGSYLAMCNRDLGADAVYAWPSAEIAVMGAEGAANVIFRKEIKAADDPDAMRAEKIEEYQNAFNTPYVAAARGQVDDVIDPADTRRKIASALEMYATKRQTRPAKKHGNFPC

SEQ ID NO: 69 - protein, 505 aa, Artificial Sequence
  Synthetic
MSPREIEVSEPREVGITELVLRDAHQSLMATRMAMEDMVGACADIDAAGYWSVECWGGATYDSCIRFLNEDPWERLRTFRKLMPNSRLQMLLRGQNLLGYRHYNDEVVDRFVDKSAENGMDVFRVFDAMNDPRNMAHAMAAVKKAGKHAQGTICYTISPVHTVEGYVKLAGQLLDMGADSIALKDMAALLKPQPAYDIIKAIKDTYGQKTQINLHCHSTTGVTEVSLMKAIEAGVDVVDTAISSMSLGPGHNPTESVAEMLEGTGYTTNLDYDRLHKIRDHFKAIRPKYKKFESKTLVDTSIFKSQIPGGMLSNMESQLRAQGAEDKMDEVMAEVPRVRKAAGFPPLVTPSSQIVGTQAVFNVMMGEYKRMTGEFADIMLGYYGASPADRDPKVVKLAEEQSGKKPITQRPADLLPPEWEEQSKEAAALKGFNGTDEDVLTYALFPQVAPVFFEHRAEGPHSVALTDAQLKAEAEGDEKSLAVAGPVTYNVNVGGTVREVTVQQA

SEQ ID NO: 70 - protein, 123 aa, Artificial Sequence
  Synthetic
MKLKVTVNGTAYDVDVDVDKSHENPMGTILFGGGTGGAPAPRAAGGAGAGKAGEGEIPAPLAGTVSKILVKEGDTVKAGQTVLVLEAMKMETEINAPTDGKVEKVLVKERDAVQGGQGLIKIG

SEQ ID NO: 71 - DNA, 7584 bp, Artificial Sequence
  Synthetic
taagacccactttcacatttaagttgtttttctaatccgcatatgatcaattcaaggccgaataagaaggctggctctgcaccttggtgatcaaataattcgatagcttgtcgtaataatggcggcatactatcagtagtaggtgtttccctttcttctttagcgacttgatgctcttgatcttccaatacgcaacctaaagtaaaatgccccacagcgctgagtgcatataatgcattctctagtgaaaaaccttgttggcataaaaaggctaattgattttcgagagtttcatactgtttttctgtaggccgtgtacctaaatgtacttttgctccatcgcgatgacttagtaaagcacatctaaaacttttagcgttattacgtaaaaaatcttgccagctttccccttctaaagggcaaaagtgagtatggtgcctatctaacatctcaatggctaaggcgtcgagcaaagcccgcttattttttacatgccaatacaatgtaggctgctctacacctagcttctgggcgagtttacgggttgttaaaccttcgattccgacctcattaagcagctctaatgcgctgttaatcactttacttttatctaatctagacatcattaattcctaatttttgttgacactctatcattgatagagttattttaccactccctatcagtgatagagaaaagtgaactctagaaataattttgtttaactttaagaaggagatatacatatgcaaacacaaaaaccgactctcgaactgctaacctgcgaaggcgcttatcgcgacaacccgactgcgctttttcaccagttgtgtggggatcgtccggcaacgctgctgctggaatccgcagatatcgacagcaaagatgatttaaaaagcctgctgctggtagacagtgcgctgcgcattacagcattaagtgacactgtcacaatccaggcgctttccggcaatggagaagccctgttgacactactggataacgccttgcctgcgggtgtggaaaatgaacaatcaccaaactgccgcgtactgcgcttcccgcctgtcagtccactgctggatgaagacgcccgcttatgctccctttcggtttttgacgctttccgcttattacagaatctgttgaatgtaccgaaggaagaacgagaagcaatgttcttcggcggcctgttctcttatgaccttgtggcgggatttgaaaatttaccgcaactgtcagcggaaaatagctgccctgatttctgtttttatctcgctgaaacgctgatggtgattgaccatcagaaaaaaagcactcgtattcaggccagcctgtttgctccgaatgaagaagaaaaacaacgtctcactgctcgcctgaacgaactacgtcagcaactgaccgaagccgcgccgccgctgccggtggtttccgtgccgcatatgcgttgtgaatgtaaccagagcgatgaagagttcggtggtgtagtgcgtttgttgcaaaaagcgattcgcgccggagaaattttccaggtggtgccatctcgccgtttctctctgccctgcccgtcaccgctggcagcctattacgtgctgaaaaagagtaatcccagcccgtacatgttttttatgcaggataatgatttcaccctgtttggcgcgtcgccggaaagttcgctcaagtatgacgccaccagccgccagattgagatttacccgattgccggaacacgtccacgcggtcgtcgtgccgatggttcgctggacagagacctcgacagccgcatcgaactggagatgcgtaccgatcataaagagctttctgaacatctgatgctggtggatctcgcccgtaatgacctggcacgcatttgcacacccggcagccgctacgtcgccgatctcaccaaagttgaccgttactcttacgtgatgcacctagtctcccgcgttgttggtgagctgcgccacgatctcgacgccctgcacgcttaccgcgcctgtatgaatatggggacgttaagcggtgcaccgaaagtacgcgctatgcagttaattgccgaagcagaaggtcgtcgacgcggcagctacggcggcgcggtaggttattttaccgcgcatggcgatctcgacacctgcattgtgatccgctcggcgctggtggaaaacggtatcgccaccgtgcaagccggtgctggcgtagtccttgattctgttccgcagtcggaagccgacgaaactcgtaataaagcccgcgctgtactgcgcgctattgccaccgcgcatcatgcacaggagacgttctaatggctgacattctgctgctcgataatatcgactcttttacgtacaacctggcagatcagttgcgcagcaatggtcataacgtggtgatttaccgcaaccatattccggcgcagaccttaattgaacgcctggcgacgatgagcaatccggtgctgatgctttctcctggccccggtgtgccgagcgaagccggttgtatgccggaactcctcacccgcttgcgtggcaagctgccaattattggcatttgcctcggacatcaggcgattgtcgaagcttacgggggctatgtcggtcaggcgggcgaaattcttcacggtaaagcgtcgagcattgaacatgacggtcaggcgatgtttgccggattaacaaacccgctgccagtggcgcgttatcactcgctggttggcagtaacattccggccggtttaaccatcaacgcccattttaatggcatggtgatggcggtgcgtcacgatgcagatcgcgtttgtggattccagttccatccggaatccattcttactacccagggcgctcgcctgctggaacaaacgctggcctgggcgcagcagaaactagagccaaccaacacgctgcaaccgattctggaaaaactgtatcaggcacagacgcttagccaacaagaaagccaccagctgttttcagcggtggtacgtggcgagctgaagccggaacaactggcggcggcgctggtgagcatgaaaattcgcggtgaacacccgaacgagatcgccggggcagcaaccgcgctactggaaaacgccgcgccattcccgcgcccggattatctgtttgccgatatcgtcggtactggcggtgacggcagcaacagcatcaatatttctaccgccagtgcgtttgtcgccgcggcctgcgggctgaaagtggcgaaacacggcaaccgtagcgtctccagtaaatccggctcgtcggatctgctggcggcgttcggtattaatcttgatatgaacgccgataaatcgcgccaggcgctggatgagttaggcgtctgtttcctctttgcgccgaagtatcacaccggattccgccatgcgatgccggttcgccagcaactgaaaacccgcactctgttcaacgtgctgggaccattgattaacccggcgcatccgccgctggcgctaattggtgtttatagtccggaactggtgctgccgattgccgaaaccttgcgcgtgctggggtatcaacgcgcggcagtggtgcacagcggcgggatggatgaagtttcattacacgcgccgacaatcgttgccgaactacatgacggcgaaattaagagctatcaattgaccgctgaagattttggcctgacaccctaccaccaggagcaattggcaggcggaacaccggaagaaaaccgtgacattttaacacgcttgttacaaggtaaaggcgacgccgcccatgaagcagccgtcgcggcgaatgtcgccatgttaatgcgcctgcatggccatgaagatctgcaagccaatgcgcaaaccgttcttgaggtactgcgcagtggttccgcttacgacagagtcaccgcactggcggcacgagggtaaatgatgcaaaccgttttagcgaaaatcgtcgcagacaaggcgatttgggtagaaacccgcaaagagcagcaaccgctggccagttttcagaatgaggttcagccgagcacgcgacatttttatgatgcacttcagggcgcacgcacggcgtttattctggagtgtaaaaaagcgtcgccgtcaaaaggcgtgatccgtgatgatttcgatccggcacgcattgccgccatttataaacattacgcttcggcaatttcagtgctgactgatgagaaatattttcaggggagctttgatttcctccccatcgtcagccaaatcgccccgcagccgattttatgtaaagacttcattatcgatccttaccagatctatctggcgcgctattaccaggccgatgcctgcttattaatgctttcagtactggatgacgaacaatatcgccagcttgcagccgtcgcccacagtctggagatgggtgtgctgaccgaagtcagtaatgaagaggaactggagcgcgccattgcattgggggcaaaggtcgttggcatcaacaaccgcgatctgcgcgatttgtcgattgatctcaaccgtacccgcgagcttgcgccgaaactggggcacaacgtgacggtaatcagcgaatccggcatcaatacttacgctcaggtgcgcgagttaagccacttcgctaacggctttctgattggttcggcgttgatggcccatgacgatttgaacgccgccgtgcgtcgggtgttgctgggtgagaataaagtatgtggcctgacacgtgggcaagatgctaaagcagcttatgacgcgggcgcgatttacggtgggttgatttttgttgcgacatcaccgcgttgcgtcaacgttgaacaggcgcaggaagtgatggctgcagcaccgttgcagtatgttggcgtgttccgcaatcacgatattgccgatgtggcggacaaagctaaggtgttatcgctggcggcagtgcaactgcatggtaatgaagatcagctgtatatcgacaatctgcgtgaggctctgccagcacacgtcgccatctggaaggctttaagtgtcggtgaaactcttcccgcgcgcgattttcagcacatcgataaatatgtattcgacaacggtcagggcgggagcggacaacgtttcgactggtcactattaaatggtcaatcgcttggcaacgttctgctggcggggggcttaggcgcagataactgcgtggaagcggcacaaaccggctgcgccgggcttgattttaattctgctgtagagtcgcaaccgggtatcaaagacgcacgtcttttggcctcggttttccagacgctgcgcgcatattaaggaaaggaacaatgacaacattacttaacccctattttggtgagtttggcggcatgtacgtgccacaaatcctgatgcctgctctgcgccagctggaagaagcttttgtcagcgcgcaaaaagatcctgaatttcaggctcagttcaacgacctgctgaaaaactatgccgggcgtccaaccgcgctgaccaaatgccagaacattacagccgggacgaacaccacgctgtatctgaagcgcgaagatttgctgcacggcggcgcgcataaaactaaccaggtgctcggtcaggctttactggcgaagcggatgggtaaaactgaaattattgccgaaaccggtgccggtcagcatggcgtggcgtcggcccttgccagcgccctgctcggcctgaaatgccgaatttatatgggtgccaaagacgttgaacgccagtcgcccaacgttttccggatgcgcttaatgggtgcggaagtgatcccggtacatagcggttccgcgaccctgaaagatgcctgtaatgaggcgctacgcgactggtccggcagttatgaaaccgcgcactatatgctgggtaccgcagctggcccgcatccttacccgaccattgtgcgtgagtttcagcggatgattggcgaagaaacgaaagcgcagattctggaaagagaaggtcgcctgccggatgccgttatcgcctgtgttggcggtggttcgaatgccatcggtatgtttgcagatttcatcaacgaaaccgacgtcggcctgattggtgtggagcctggcggccacggtatcgaaactggcgagcacggcgcaccgttaaaacatggtcgcgtgggcatctatttcggtatgaaagcgccgatgatgcaaaccgaagacgggcaaattgaagagtcttactccatttctgccgggctggatttcccgtccgtcggcccgcaacatgcgtatctcaacagcactggacgcgctgattacgtgtctattaccgacgatgaagccctggaagcctttaaaacgctttgcctgcatgaagggatcatcccggcgctggaatcctcccacgccctggcccatgcgctgaaaatgatgcgcgaaaatccggaaaaagagcagctactggtggttaacctttccggtcgcggcgataaagacatcttcaccgttcacgatattttgaaagcacgaggggaaatctgatggaacgctacgaatctctgtttgcccagttgaaggagcgcaaagaaggcgcattcgttcctttcgtcaccctcggtgatccgggcattgagcagtcgttgaaaattatcgatacgctaattgaagccggtgctgacgcgctggagttaggcatccccttctccgacccactggcggatggcccgacgattcaaaacgccacactgcgtgcttttgcggcgggagtaaccccggcgcagtgctttgagatgctggcactcattcgccagaagcacccgaccattcccatcggccttttgatgtatgccaacctggtgtttaacaaaggcattgatgagttttatgccgagtgcgagaaagtcggcgtcgattcggtgctggttgccgatgtgcccgtggaagagtccgcgcccttccgccaggccgcgttgcgtcataatgtcgcacctatctttatttgcccgccgaatgccgacgatgatttgctgcgccagatagcctcttacggtcgtggttacacctatttgctgtcgcgagcgggcgtgaccggcgcagaaaaccgcgccgcgttacccctcaatcatctggttgcgaagctgaaagagtacaacgctgcgcctccattgcagggatttggtatttccgccccggatcaggtaaaagccgcgattgatgcaggagctgcgggcgcgatttctggttcggccatcgttaaaatcatcgagcaacatattaatgagccagagaaaatgctggcggcactgaaagcttttgtacaaccgatgaaagcggcgacgcgcagttaatacgcatggcatggatgaccgatggtagtgtggggtctccccatgcgagagtagggaactgccaggcatcaaataaaacgaaaggctcagtcgaaagactgggcctttcgttttatctgttgtttgtcggtgaacgctctcctgagtaggacaaatccgccgggagcggatttgaacgttgcgaagcaacggcccggagggtggcgggcaggacgcccgccataaactgccaggcatcaaattaagcagaaggccatcctgacggatggcctttttgcgtggccagtgccaagcttgcatgcgtgc

SEQ ID NO: 72 - protein, 5 aa, Artificial Sequence
  Synthetic
GGGGS

SEQ ID NO: 73 - protein, 18 aa, Artificial Sequence
  Synthetic
KESGSVSSEQLAQFRSLD

SEQ ID NO: 74 - DNA, 1562 bp, Artificial Sequence
  Synthetic
atgcaaacacaaaaaccgactctcgaactgctaacctgcgaaggcgcttatcgcgacaacccgactgcgctttttcaccagttgtgtggggatcgtccggcaacgctgctgctggaatccgcagatatcgacagcaaagatgatttaaaaagcctgctgctggtagacagtgcgctgcgcattacagcattaagtgacactgtcacaatccaggcgctttccggcaatggagaagccctgttgacactactggataacgccttgcctgcgggtgtggaaaatgaacaatcaccaaactgccgcgtactgcgcttcccgcctgtcagtccactgctggatgaagacgcccgcttatgctccctttcggtttttgacgctttccgcttattacagaatctgttgaatgtaccgaaggaagaacgagaagcaatgttcttcggcggcctgttctcttatgaccttgtggcgggatttgaaaatttaccgcaactgtcagcggaaaatagctgccctgatttctgtttttatctcgctgaaacgctgatggtgattgaccatcagaaaaaaagcactcgtattcaggccagcctgtttgctccgaatgaagaagaaaaacaacgtctcactgctcgcctgaacgaactacgtcagcaactgaccgaagccgcgccgccgctgccggtggtttccgtgccgcatatgcgttgtgaatgtaaccagagcgatgaagagttcggtggtgtagtgcgtttgttgcaaaaagcgattcgcgccggagaaattttccaggtggtgccatctcgccgtttctctctgccctgcccgtcaccgctggcagcctattacgtgctgaaaaagagtaatcccagcccgtacatgttttttatgcaggataatgatttcaccctgtttggcgcgtcgccggaaagttcgctcaagtatgacgccaccagccgccagattgagatttacccgattgccggaacacgtccacgcggtcgtcgtgccgatggttcgctggacagagacctcgacagccgcatcgaactggagatgcgtaccgatcataaagagctttctgaacatctgatgctggtggatctcgcccgtaatgacctggcacgcatttgcacacccggcagccgctacgtcgccgatctcaccaaagttgaccgttactcttacgtgatgcacctagtctcccgcgttgttggtgagctgcgccacgatctcgacgccctgcacgcttaccgcgcctgtatgaatatggggacgttaagcggtgcaccgaaagtacgcgctatgcagttaattgccgaagcagaaggtcgtcgacgcggcagctacggcggcgcggtaggttattttaccgcgcatggcgatctcgacacctgcattgtgatccgctcggcgctggtggaaaacggtatcgccaccgtgcaagccggtgctggcgtagtccttgattctgttccgcagtcggaagccgacgaaactcgtaataaagcccgcgctgtactgcgcgctattgccaccgcgcatcatgcacaggagacgttcta

SEQ ID NO: 75 - protein, 520 aa, Artificial Sequence
  Synthetic
MQTQKPTLELLTCEGAYRDNPTALFHQLCGDRPATLLLESADIDSKDDLKSLLLVDSALRITALSDTVTIQALSGNGEALLTLLDNALPAGVENEQSPNCRVLRFPPVSPLLDEDARLCSLSVFDAFRLLQNLLNVPKEEREAMFFGGLFSYDLVAGFENLPQLSAENSCPDFCFYLAETLMVIDHQKKSTRIQASLFAPNEEEKQRLTARLNELRQQLTEAAPPLPVVSVPHMRCECNQSDEEFGGVVRLLQKAIRAGEIFQVVPSRRFSLPCPSPLAAYYVLKKSNPSPYMFFMQDNDFTLFGASPESSLKYDATSRQIEIYPIAGTRPRGRRADGSLDRDLDSRIELEMRTDHKELSEHLMLVDLARNDLARICTPGSRYVADLTKVDRYSYVMHLVSRVVGELRHDLDALHAYRACMNMGTLSGAPKVRAMQLIAEAEGRRRGSYGGAVGYFTAHGDLDTCIVIRSALVENGIATVQAGAGVVLDSVPQSEADETRNKARAVLRAIATAHHAQETF

SEQ ID NO: 76 - DNA, 1596 bp, Artificial Sequence
  Synthetic
atggctgacattctgctgctcgataatatcgactcttttacgtacaacctggcagatcagttgcgcagcaatggtcataacgtggtgatttaccgcaaccatattccggcgcagaccttaattgaacgcctggcgacgatgagcaatccggtgctgatgctttctcctggccccggtgtgccgagcgaagccggttgtatgccggaactcctcacccgcttgcgtggcaagctgccaattattggcatttgcctcggacatcaggcgattgtcgaagcttacgggggctatgtcggtcaggcgggcgaaattcttcacggtaaagcgtcgagcattgaacatgacggtcaggcgatgtttgccggattaacaaacccgctgccagtggcgcgttatcactcgctggttggcagtaacattccggccggtttaaccatcaacgcccattttaatggcatggtgatggcggtgcgtcacgatgcagatcgcgtttgtggattccagttccatccggaatccattcttactacccagggcgctcgcctgctggaacaaacgctggcctgggcgcagcagaaactagagccaaccaacacgctgcaaccgattctggaaaaactgtatcaggcacagacgcttagccaacaagaaagccaccagctgttttcagcggtggtacgtggcgagctgaagccggaacaactggcggcggcgctggtgagcatgaaaattcgcggtgaacacccgaacgagatcgccggggcagcaaccgcgctactggaaaacgccgcgccattcccgcgcccggattatctgtttgccgatatcgtcggtactggcggtgacggcagcaacagcatcaatatttctaccgccagtgcgtttgtcgccgcggcctgcgggctgaaagtggcgaaacacggcaaccgtagcgtctccagtaaatccggctcgtcggatctgctggcggcgttcggtattaatcttgatatgaacgccgataaatcgcgccaggcgctggatgagttaggcgtctgtttcctctttgcgccgaagtatcacaccggattccgccatgcgatgccggttcgccagcaactgaaaacccgcactctgttcaacgtgctgggaccattgattaacccggcgcatccgccgctggcgctaattggtgtttatagtccggaactggtgctgccgattgccgaaaccttgcgcgtgctggggtatcaacgcgcggcagtggtgcacagcggcgggatggatgaagtttcattacacgcgccgacaatcgttgccgaactacatgacggcgaaattaagagctatcaattgaccgctgaagattttggcctgacaccctaccaccaggagcaattggcaggcggaacaccggaagaaaaccgtgacattttaacacgcttgttacaaggtaaaggcgacgccgcccatgaagcagccgtcgcggcgaatgtcgccatgttaatgcgcctgcatggccatgaagatctgcaagccaatgcgcaaaccgttcttgaggtactgcgcagtggttccgcttacgacagagtcaccgcactggcggcacgagggtaa

SEQ ID NO: 77 - protein, 531 aa, Artificial Sequence
  Synthetic
MADILLLDNIDSFTYNLADQLRSNGHNVVIYRNHIPAQTLIERLATMSNPVLMLSPGPGVPSEAGCMPELLTRLRGKLPIIGICLGHQAIVEAYGGYVGQAGEILHGKASSIEHDGQAMFAGLTNPLPVARYHSLVGSNIPAGLTINAHFNGMVMAVRHDADRVCGFQFHPESILTTQGARLLEQTLAWAQQKLEPTNTLQPILEKLYQAQTLSQQESHQLFSAVVRGELKPEQLAAALVSMKIRGEHPNEIAGAATALLENAAPFPRPDYLFADIVGTGGDGSNSINISTASAFVAAACGLKVAKHGNRSVSSKSGSSDLLAAFGINLDMNADKSRQALDELGVCFLFAPKYHTGFRHAMPVRQQLKTRTLFNVLGPLINPAHPPLALIGVYSPELVLPIAETLRVLGYQRAAVVHSGGMDEVSLHAPTIVAELHDGEIKSYQLTAEDFGLTPYHQEQLAGGTPEENRDILTRLLQGKGDAAHEAAVAANVAMLMRLHGHEDLQANAQTVLEVLRSGSAYDRVTALAARG

SEQ ID NO: 78 - DNA, 1359 bp, Artificial Sequence
  Synthetic
atgcaaaccgttttagcgaaaatcgtcgcagacaaggcgatttgggtagaaacccgcaaagagcagcaaccgctggccagttttcagaatgaggttcagccgagcacgcgacatttttatgatgcacttcagggcgcacgcacggcgtttattctggagtgtaaaaaagcgtcgccgtcaaaaggcgtgatccgtgatgatttcgatccggcacgcattgccgccatttataaacattacgcttcggcaatttcagtgctgactgatgagaaatattttcaggggagctttgatttcctccccatcgtcagccaaatcgccccgcagccgattttatgtaaagacttcattatcgatccttaccagatctatctggcgcgctattaccaggccgatgcctgcttattaatgctttcagtactggatgacgaacaatatcgccagcttgcagccgtcgcccacagtctggagatgggtgtgctgaccgaagtcagtaatgaagaggaactggagcgcgccattgcattgggggcaaaggtcgttggcatcaacaaccgcgatctgcgcgatttgtcgattgatctcaaccgtacccgcgagcttgcgccgaaactggggcacaacgtgacggtaatcagcgaatccggcatcaatacttacgctcaggtgcgcgagttaagccacttcgctaacggctttctgattggttcggcgttgatggcccatgacgatttgaacgccgccgtgcgtcgggtgttgctgggtgagaataaagtatgtggcctgacacgtgggcaagatgctaaagcagcttatgacgcgggcgcgatttacggtgggttgatttttgttgcgacatcaccgcgttgcgtcaacgttgaacaggcgcaggaagtgatggctgcagcaccgttgcagtatgttggcgtgttccgcaatcacgatattgccgatgtggcggacaaagctaaggtgttatcgctggcggcagtgcaactgcatggtaatgaagatcagctgtatatcgacaatctgcgtgaggctctgccagcacacgtcgccatctggaaggctttaagtgtcggtgaaactcttcccgcgcgcgattttcagcacatcgataaatatgtattcgacaacggtcagggcgggagcggacaacgtttcgactggtcactattaaatggtcaatcgcttggcaacgttctgctggcggggggcttaggcgcagataactgcgtggaagcggcacaaaccggctgcgccgggcttgattttaattctgctgtagagtcgcaaccgggtatcaaagacgcacgtcttttggcctcggttttccagacgctgcgcgcatattaa

SEQ ID NO: 79 - protein, 452 aa, Artificial Sequence
  Synthetic
MQTVLAKIVADKAIWVETRKEQQPLASFQNEVQPSTRHFYDALQGARTAFILECKKASPSKGVIRDDFDPARIAAIYKHYASAISVLTDEKYFQGSFDFLPIVSQIAPQPILCKDFIIDPYQIYLARYYQADACLLMLSVLDDEQYRQLAAVAHSLEMGVLTEVSNEEELERAIALGAKVVGINNRDLRDLSIDLNRTRELAPKLGHNVTVISESGINTYAQVRELSHFANGFLIGSALMAHDDLNAAVRRVLLGENKVCGLTRGQDAKAAYDAGAIYGGLIFVATSPRCVNVEQAQEVMAAAPLQYVGVFRNHDIADVADKAKVLSLAAVQLHGNEDQLYIDNLREALPAHVAIWKALSVGETLPARDFQHIDKYVFDNGQGGSGQRFDWSLLNGQSLGNVLLAGGLGADNCVEAAQTGCAGLDFNSAVESQPGIKDARLLASVFQTLRAY

SEQ ID NO: 80 - DNA, 1194 bp, Artificial Sequence
  Synthetic
atgacaacattacttaacccctattttggtgagtttggcggcatgtacgtgccacaaatcctgatgcctgctctgcgccagctggaagaagcttttgtcagcgcgcaaaaagatcctgaatttcaggctcagttcaacgacctgctgaaaaactatgccgggcgtccaaccgcgctgaccaaatgccagaacattacagccgggacgaacaccacgctgtatctgaagcgcgaagatttgctgcacggcggcgcgcataaaactaaccaggtgctcggtcaggctttactggcgaagcggatgggtaaaactgaaattattgccgaaaccggtgccggtcagcatggcgtggcgtcggcccttgccagcgccctgctcggcctgaaatgccgaatttatatgggtgccaaagacgttgaacgccagtcgcccaacgttttccggatgcgcttaatgggtgcggaagtgatcccggtacatagcggttccgcgaccctgaaagatgcctgtaatgaggcgctacgcgactggtccggcagttatgaaaccgcgcactatatgctgggtaccgcagctggcccgcatccttacccgaccattgtgcgtgagtttcagcggatgattggcgaagaaacgaaagcgcagattctggaaagagaaggtcgcctgccggatgccgttatcgcctgtgttggcggtggttcgaatgccatcggtatgtttgcagatttcatcaacgaaaccgacgtcggcctgattggtgtggagcctggcggccacggtatcgaaactggcgagcacggcgcaccgttaaaacatggtcgcgtgggcatctatttcggtatgaaagcgccgatgatgcaaaccgaagacgggcaaattgaagagtcttactccatttctgccgggctggatttcccgtccgtcggcccgcaacatgcgtatctcaacagcactggacgcgctgattacgtgtctattaccgacgatgaagccctggaagcctttaaaacgctttgcctgcatgaagggatcatcccggcgctggaatcctcccacgccctggcccatgcgctgaaaatgatgcgcgaaaatccggaaaaagagcagctactggtggttaacctttccggtcgcggcgataaagacatcttcaccgttcacgatattttgaaagcacgaggggaaatctga

SEQ ID NO: 81 - protein, 397 aa, Artificial Sequence
  Synthetic
MTTLLNPYFGEFGGMYVPQILMPALRQLEEAFVSAQKDPEFQAQFNDLLKNYAGRPTALTKCQNITAGTNTTLYLKREDLLHGGAHKTNQVLGQALLAKRMGKTEIIAETGAGQHGVASALASALLGLKCRIYMGAKDVERQSPNVFRMRLMGAEVIPVHSGSATLKDACNEALRDWSGSYETAHYMLGTAAGPHPYPTIVREFQRMIGEETKAQILEREGRLPDAVIACVGGGSNAIGMFADFINETDVGLIGVEPGGHGIETGEHGAPLKHGRVGIYFGMKAPMMQTEDGQIEESYSISAGLDFPSVGPQHAYLNSTGRADYVSITDDEALEAFKTLCLHEGIIPALESSHALAHALKMMRENPEKEQLLVVNLSGRGDKDIFTVHDILKARGEI

SEQ ID NO: 82 - DNA, 807 bp, Artificial Sequence
  Synthetic
atggaacgctacgaatctctgtttgcccagttgaaggagcgcaaagaaggcgcattcgttcctttcgtcaccctcggtgatccgggcattgagcagtcgttgaaaattatcgatacgctaattgaagccggtgctgacgcgctggagttaggcatccccttctccgacccactggcggatggcccgacgattcaaaacgccacactgcgtgcttttgcggcgggagtaaccccggcgcagtgctttgagatgctggcactcattcgccagaagcacccgaccattcccatcggccttttgatgtatgccaacctggtgtttaacaaaggcattgatgagttttatgccgagtgcgagaaagtcggcgtcgattcggtgctggttgccgatgtgcccgtggaagagtccgcgcccttccgccaggccgcgttgcgtcataatgtcgcacctatctttatttgcccgccgaatgccgacgatgatttgctgcgccagatagcctcttacggtcgtggttacacctatttgctgtcgcgagcgggcgtgaccggcgcagaaaaccgcgccgcgttacccctcaatcatctggttgcgaagctgaaagagtacaacgctgcgcctccattgcagggatttggtatttccgccccggatcaggtaaaagccgcgattgatgcaggagctgcgggcgcgatttctggttcggccatcgttaaaatcatcgagcaacatattaatgagccagagaaaatgctggcggcactgaaagcttttgtacaaccgatgaaagcggcgacgcgcagttaa

SEQ ID NO: 83 - protein, 268 aa, Artificial Sequence
  Synthetic
MERYESLFAQLKERKEGAFVPFVTLGDPGIEQSLKIIDTLIEAGADALELGIPFSDPLADGPTIQNATLRAFAAGVTPAQCFEMLALIRQKHPTIPIGLLMYANLVFNKGIDEFYAECEKVGVDSVLVADVPVEESAPFRQAALRHNVAPIFICPPNADDDLLRQIASYGRGYTYLLSRAGVTGAENRAALPLNHLVAKLKEYNAAPPLQGFGISAPDQVKAAIDAGAAGAISGSAIVKIIEQHINEPEKMLAALKAFVQPMKAATRS

SEQ ID NO: 84 - protein, 350 aa, E. coli
MNYQNDDLRIKEIKELLPPVALLEKFPATENAANTVAHARKAIHKILKGNDDRLLVVIGPCSIHDPVAAKEYATRLLTLREELQDELEIVMRVYFEKPRTTVGWKGLINDPHMDNSFQINDGLRIARKLLLDINDSGLPAAGEFLDMITLQYLADLMSWGAIGARTTESQVHRELASGLSCPVGFKNGTDGTIKVAIDAINAAGAPHCFLSVTKWGHSAIVNTSGNGDCHIILRGGKEPNYSAKHVAEVKEGLNKAGLPAQVMIDFSHANSSKQFKKQMDVCTDVCQQIAGGEKAIIGVMVESHLVEGNQSLESGEPLAYGKSITDACIGWDDTDALLRQLASAVKARRG

SEQ ID NO: 85 - protein, 520 aa, E. coli
MQTQKPTLELLTCEGAYRDNPTALFHQLCGDRPATLLLEFADIDSKDDLKSLLLVDSALRITALSDTVTIQALSGNGEALLTLLDNALPAGVENEQSPNCRVLRFPPVSPLLDEDARLCSLSVFDAFRLLQNLLNVPKEEREAMFFGGLFSYDLVAGFENLPQLSAENSCPDFCFYLAETLMVIDHQKKSTRIQASLFAPNEEEKQRLTARLNELRQQLTEAAPPLPVVSVPHMRCECNQSDEEFGGVVRLLQKAIRAGEIFQVVPSRRFSLPCPSPLAAYYVLKKSNPSPYMFFMQDNDFTLFGASPESSLKYDATSRQIEIYPIAGTRPRGRRADGSLDRDLDSRIELEMRTDHKELSEHLMLVDLARNDLARICTPGSRYVADLTKVDRYSYVMHLVSRVVGELRHDLDALHAYRACMNMGTLSGAPKVRAMQLIAEAEGRRRGSYGGAVGYFTAHGDLDTCIVIRSALVENGIATVQAGAGVVLDSVPQSEADETRNKARAVLRAIATAHHAQETF

SEQ ID NO: 86 - protein, 410 aa, E. coli
MAKVSLEKDKIKFLLVEGVHQKALESLRAAGYTNIEFHKGALDDEQLKESIRDAHFIGLRSRTHLTEDVINAAEKLVAIGCFCIGTNQVDLDAAAKRGIPVFNAPFSNTRSVAELVIGELLLLLRGVPEANAKAHRGVWNKLAAGSFEARGKKLGIIGYGHIGTQLGILAESLGMYVYFYDIENKLPLGNATQVQHLSDLLNMSDVVSLHVPENPSTKNMMGAKEISLMKPGSLLINASRGTVVDIPALCDALASKHLAGAAIDVFPTEPATNSDPFTSPLCEFDNVLLTPHIGGSTQEAQENIGLEVAGKLIKYSDNGSTLSAVNFPEVSLPLHGGRRLMHIHENRPGVLTALNKIFAEQGVNIAAQYLQTSAQMGYVVIDIEADEDVAEKALQAMKAIPGTIRARLLY

SEQ ID NO: 87 - protein, 410 aa, E. coli
MAKVSLEKDKIKFLLVEGVHQKALESLRAAGYTNIEFHKGALDDEQLKESIRDAHFIGLRSRTHLTEDVINAAEKLVAIGCFCIGTNQVDLDAAAKRGIPVFNAPFSNTRSVAELVIGELLLLLRGVPEANAKAHRGVWNKLAAGSFEARGKKLGIIGYGHIGTQLGILAESLGMYVYFYDIENKLPLGNATQVQHLSDLLNMSDVVSLHVPENPSTKNMMGAKEISLMKPGSLLINASRGTVVDIPALCDALASKHLAGAAIDVFPTEPATNSDPFTSPLCEFDNVLLTPHIGGSTQEAQENIGLEVAGKLIKYSDNGSTLSAVNFPEVSLPLHGGRRLMHIAEARPGVLTALNKIFAEQGVNIAAQYLQTSAQMGYVVIDIEADEDVAEKALQAMKAIPGTIRARLLY

SEQ ID NO: 88 - protein, 471 aa, E. coli
MENFKHLPEPFRIRVIEPVKRTTRAYREEAIIKSGMNPFLLDSEDVFIDLLTDSGTGAVTQSMQAAMMRGDEAYSGSRSYYALAESVKNIFGYQYTIPTHQGRGAEQIYIPVLIKKREQEKGLDRSKMVAFSNYFFDTTQGHSQINGCTVRNVYIKEAFDTGVRYDFKGNFDLEGLERGIEEVGPNNVPYIVATITSNSAGGQPVSLANLKVMYSIAKKYDIPVVMDSARFAENAYFIKQREAEYKDWTIEQITRETYKYADMLAMSAKKDAMVPMGGLLCMKDDSFFDVYTECRTLCVVQEGFPTYGGLEGGAMERLAVGLYDGMNLDWLAYRIAQVQYLVDGLEEIGVVCQQAGGHAAFVDAGKLLPHIPADQFPAQALACELYKVAGIRAVEIGSFLLGRDPKTGKQLPCPAELLRLTIPRATYTQTHMDFIIEAFKHVKENAANIKGLTFTYEPKVLRHFTAKLKEV

SEQ ID NO: 89 - protein, 14 aa, Artificial Sequence
  Synthetic
EGKSSGSGSESKST

SEQ ID NO: 90 - protein, 8 aa, Artificial Sequence
  Synthetic
GGGGGGGG

SEQ ID NO: 91 - protein, 12 aa, Artificial Sequence
  Synthetic
GSAGSAAGSGEF

SEQ ID NO: 92 - DNA, 18 bp, Artificial Sequence
  Synthetic
ttgttgayryrtcaacwa

SEQ ID NO: 93 - DNA, 15 bp, Artificial Sequence
  Synthetic
  misc_feature (8)..(8): n is a, c, g, or t
ttataatnattataa

SEQ ID NO: 94 - protein, 471 aa, E. coli
MENFKHLPEPFRIRVIEPVKRTTRAYREEAIIKSGMNPFLLDSEDVFIDLLTDSGTGAVTQSMQAAMMRGDEAYSGSRSYYALAESVKNIFGYQYTIPTHQGRGAEQIYIPVLIKKREQEKGLDRSKMVAFSNYFFDTTQGHSQINGCTVRNVYIKEAFDTGVRYDFKGNFDLEGLERGIEEVGPNNVPYIVATITSNSAGGQPVSLANLKAMYSIAKKYDIPVVMDSARFAENAYFIKQREAEYKDWTIEQITRETYKYADMLAMSAKKDAMVPMGGLLCMKDDSFFDVYTECRTLCVVQEGFPTYGGLEGGAMERLAVGLYDGMNLDWLAYRIAQVQYLVDGLEEIGVVCQQAGGHAAFVDAGKLLPHIPADQFPAQALACELYKVAGIRAVEIGSFLLGRDPKTGKQLPCPAELLRLTIPRATYTQTHMDFIIEAFKHVKENAANIKGLTFTYEPKVLRHFTAKLKEV

SEQ ID NO: 95 - DNA, 22 bp, Artificial Sequence
  Synthetic
ggaattgtgagcgctcacaatt

SEQ ID NO: 96 - DNA, 24 bp, Artificial Sequence
  Synthetic
ggaaaatttttttaaaaaaaaaac

SEQ ID NO: 97 - DNA, 70 bp, Artificial Sequence
  Synthetic
tgacggcgattgagccgacgggtggaaacccaaaacgtaatcaacaagtataaactctgggaggttccta

SEQ ID NO: 98 - DNA, 669 bp, Artificial Sequence
  Synthetic
caatatcctcgtaatcctaaggacgccactatgaaacgccatctgaacacctcctatcgcttagtctggaaccatattaccggtgctttcgttgttgcatcagagctggcccgcgctcgtggtaagcgtgcaggcgtggcggtagccttaagcctggcagcagcaacatctttgcctgcgttagcatcgccaggtcaaggaacgcagtcagagaattcatgcactcactttccgggcaatctgccgaatatgctgcgcgatctgcgagatgcattctctcgcgtgaaaacgttctttcaaatgaaagatcaactggataatctgctgctgaaggagtcgttgttggaggattttaaggggtatctgggttgtcaagcactgtctgaaatgattcaattttacttggaggaagttatgccgcaagcggaaaaccaagatccggatattaaggcgcacgtgaactcactgggcgaaaacctgaaaactttgcgcctgcgtctgagacgatgtcaccgattcctgccgtgtgaaaacaagtcaaaggcggttgagcaagttaagaatgctttcaataagctgcaagaaaagggcatctataaagcgatgtctgaatttgatatctttataaactacatagaagcttatatgactatgaagattcgaaattaa

SEQ ID NO: 99 - DNA, 30 bp, Artificial Sequence
  Synthetic
caatatcctcgtaatcctaaggacgccact

SEQ ID NO: 100 - DNA, 156 bp, Artificial Sequence
  Synthetic
atgaaacgccatctgaacacctcctatcgcttagtctggaaccatattaccggtgctttcgttgttgcatcagagctggcccgcgctcgtggtaagcgtgcaggcgtggcggtagccttaagcctggcagcagcaacatctttgcctgcgttagca

SEQ ID NO: 101 - DNA, 483 bp, Artificial Sequence
  Synthetic
tcgccaggtcaaggaacgcagtcagagaattcatgcactcactttccgggcaatctgccgaatatgctgcgcgatctgcgagatgcattctctcgcgtgaaaacgttctttcaaatgaaagatcaactggataatctgctgctgaaggagtcgttgttggaggattttaaggggtatctgggttgtcaagcactgtctgaaatgattcaattttacttggaggaagttatgccgcaagcggaaaaccaagatccggatattaaggcgcacgtgaactcactgggcgaaaacctgaaaactttgcgcctgcgtctgagacgatgtcaccgattcctgccgtgtgaaaacaagtcaaaggcggttgagcaagttaagaatgctttcaataagctgcaagaaaagggcatctataaagcgatgtctgaatttgatatctttataaactacatagaagcttatatgactatgaagattcgaaattaa

SEQ ID NO: 102 - DNA, 637 bp, Artificial Sequence
  Synthetic
ttaacaaagatagttatcgcagtaggaggcccccatgttttggcgcgacatgacactttcggtgtggcgcaaaaaaacgactggccttaaaactaagaagcgtttactggctttggtattggctgctgcattgtgctcaagccctgtctgggcgtcgccaggtcaaggaacgcagtcagagaattcatgcactcactttccgggcaatctgccgaatatgctgcgcgatctgcgagatgcattctctcgcgtgaaaacgttctttcaaatgaaagatcaactggataatctgctgctgaaggagtcgttgttggaggattttaaggggtatctgggttgtcaagcactgtctgaaatgattcaattttacttggaggaagttatgccgcaagcggaaaaccaagatccggatattaaggcgcacgtgaactcactgggcgaaaacctgaaaactttgcgcctgcgtctgagacgatgtcaccgattcctgccgtgtgaaaacaagtcaaaggcggttgagcaagttaagaatgctttcaataagctgcaagaaaagggcatctataaagcgatgtctgaatttgatatctttataaactacatagaagcttatatgactatgaagattcgaaattaa

SEQ ID NO: 103 - DNA, 34 bp, Artificial Sequence
  Synthetic
ttaacaaagatagttatcgcagtaggaggccccc

SEQ ID NO: 104 - DNA, 120 bp, Artificial Sequence
  Synthetic
atgttttggcgcgacatgacactttcggtgtggcgcaaaaaaacgactggccttaaaactaagaagcgtttactggctttggtattggctgctgcattgtgctcaagccctgtctgggcg

SEQ ID NO: 105 - DNA, 483 bp, Artificial Sequence; identical to SEQ ID NO: 101
  Synthetic

SEQ ID NO: 106 - DNA, 613 bp, Artificial Sequence
  Synthetic
tcaactcagtctacaacatcggaggttaagaatggggtacaaaatgaacattagctcgcttcgcaaagcattcatttttatgggggctgttgcagctttaagccttgtcaatgcccagtcagcgcttgcctcgccaggtcaaggaacgcagtcagagaattcatgcactcactttccgggcaatctgccgaatatgctgcgcgatctgcgagatgcattctctcgcgtgaaaacgttctttcaaatgaaagatcaactggataatctgctgctgaaggagtcgttgttggaggattttaaggggtatctgggttgtcaagcactgtctgaaatgattcaattttacttggaggaagttatgccgcaagcggaaaaccaagatccggatattaaggcgcacgtgaactcactgggcgaaaacctgaaaactttgcgcctgcgtctgagacgatgtcaccgattcctgccgtgtgaaaacaagtcaaaggcggttgagcaagttaagaatgctttcaataagctgcaagaaaagggcatctataaagcgatgtctgaatttgatatctttataaactacatagaagcttatatgactatgaagattcgaaattaa

SEQ ID NO: 107 - DNA, 31 bp, Artificial Sequence
  Synthetic
tcaactcagtctacaacatcggaggttaaga

SEQ ID NO: 108 - DNA, 99 bp, Artificial Sequence
  Synthetic
atggggtacaaaatgaacattagctcgcttcgcaaagcattcatttttatgggggctgttgcagctttaagccttgtcaatgcccagtcagcgcttgcc

SEQ ID NO: 109 - DNA, 483 bp, Artificial Sequence; identical to SEQ ID NO: 101
  Synthetic

SEQ ID NO: 110 - DNA, 674 bp, Artificial Sequence
  Synthetic
cccgtataacactaagagaggcgaattagagtatgaataagattttcaaggtcatttggaatcctgcgaccggaagctacacggttgcaagtgaaaccgctaaatcccgtggaaaaaagagtggccgcagtaaattacttatctctgctttggtcgcaggagggttattatcctcattcggcgcttcagcgtcgccaggtcaaggaacgcagtcagagaattcatgcactcactttccgggcaatctgccgaatatgctgcgcgatctgcgagatgcattctctcgcgtgaaaacgttctttcaaatgaaagatcaactggataatctgctgctgaaggagtcgttgttggaggattttaaggggtatctgggttgtcaagcactgtctgaaatgattcaattttacttggaggaagttatgccgcaagcggaaaaccaagatccggatattaaggcgcacgtgaactcactgggcgaaaacctgaaaactttgcgcctgcgtctgagacgatgtcaccgattcctgccgtgtgaaaacaagtcaaaggcggttgagcaagttaagaatgctttcaataagctgcaagaaaagggcatctataaagcgatgtctgaatttgatatctttataaactacatagaagcttatatgactatgaagattcgaaattaa

SEQ ID NO: 111 - DNA, 32 bp, Artificial Sequence
  Synthetic
cccgtataacactaagagaggcgaattagagt

SEQ ID NO: 112 - DNA, 159 bp, Artificial Sequence
  Synthetic
atgaataagattttcaaggtcatttggaatcctgcgaccggaagctacacggttgcaagtgaaaccgctaaatcccgtggaaaaaagagtggccgcagtaaattacttatctctgctttggtcgcaggagggttattatcctcattcggcgcttcagcg

SEQ ID NO: 113 - DNA, 483 bp, Artificial Sequence; identical to SEQ ID NO: 101
  Synthetic

SEQ ID NO: 114 - DNA, 7878 bp, Artificial Sequence
  Synthetic
atggatttaaattctaaaaaatatcagatgcttaaagagctatatgtaagcttcgctgaaaatgaagttaaacctttagcaacagaacttgatgaagaagaaagatttccttatgaaacagtggaaaaaatggcaaaagcaggaatgatgggtataccatatccaaaagaatatggtggagaaggtggagacactgtaggatatataatggcagttgaagaattgtctagagtttgtggtactacaggagttatattatcagctcatacatctcttggctcatggcctatatatcaatatggtaatgaagaacaaaaacaaaaattcttaagaccactagcaagtggagaaaaattaggagcatttggtcttactgagcctaatgctggtacagatgcgtctggccaacaaacaactgctgttttagacggggatgaatacatacttaatggctcaaaaatatttataacaaacgcaatagctggtgacatatatgtagtaatggcaatgactgataaatctaaggggaacaaaggaatatcagcatttatagttgaaaaaggaactcctgggtttagctttggagttaaagaaaagaaaatgggtataagaggttcagctacgagtgaattaatatttgaggattgcagaatacctaaagaaaatttacttggaaaagaaggtcaaggatttaagatagcaatgtctactcttgatggtggtagaattggtatagctgcacaagctttaggtttagcacaaggtgctcttgatgaaactgttaaatatgtaaaagaaagagtacaatttggtagaccattatcaaaattccaaaatacacaattccaattagctgatatggaagttaaggtacaagcggctagacaccttgtatatcaagcagctataaataaagacttaggaaaaccttatggagtagaagcagcaatggcaaaattatttgcagctgaaacagctatggaagttactacaaaagctgtacaacttcatggaggatatggatacactcgtgactatccagtagaaagaatgatgagagatgctaagataactgaaatatatgaaggaactagtgaagttcaaagaatggttatttcaggaaaactattaaaatagtaagaaggagatatacatatggaggaaggatttatgaatatagtcgtttgtataaaacaagttccagatacaacagaagttaaactagatcctaatacaggtactttaattagagatggagtaccaagtataataaaccctgatgataaagcaggtttagaagaagctataaaattaaaagaagaaatgggtgctcatgtaactgttataacaatgggacctcctcaagcagatatggctttaaaagaagctttagcaatgggtgcagatagaggtatattattaacagatagagcatttgcgggtgctgatacttgggcaacttcatcagcattagcaggagcattaaaaaatatagattttgatattataatagctggaagacaggcgatagatggagatactgcacaagttggacctcaaatagctgaacatttaaatcttccatcaataacatatgctgaagaaataaaaactgaaggtgaatatgtattagtaaaaagacaatttgaagattgttgccatgacttaaaagttaaaatgccatgccttataacaactcttaaagatatgaacacaccaagatacatgaaagttggaagaatatatgatgctttcgaaaatgatgtagtagaaacatggactgtaaaagatatagaagttgacccttctaatttaggtcttaaaggttctccaactagtgtatttaaatcatttacaaaatcagttaaaccagctggtacaatatacaatgaagatgcgaaaacatcagctggaattatcatagataaattaaaagagaagtatatcatataataagaaggagatatacatatgggtaacgttttagtagtaatagaacaaagagaaaatgtaattcaaactgtttctttagaattactaggaaaggctacagaaatagcaaaagattatgatacaaaagtttctgcattacttttaggtagtaaggtagaaggtttaatagatacattagcacactatggtgcagatgaggtaatagtagtagatgatgaagctttagcagtgtatacaactgaaccatatacaaaagcagcttatgaagcaataaaagcagctgaccctatagttgtattatttggtgcaacttcaataggtagagatttagcgcctagagtttctgctagaatacatacaggtcttactgctgactgtacaggtcttgcagtagctgaagatacaaaattattattaatgacaagacctgcctttggtggaaatataatggcaacaatagtttgtaaagatttcagacctcaaatgtctacagttagaccaggggttatgaagaaaaatgaacctgatgaaactaaagaagctgtaattaaccgtttcaaggtagaatttaatgatgctgataaattagttcaagttgtacaagtaataaaagaagctaaaaaacaagttaaaatagaagatgctaagatattagtttctgctggacgtggaatgggtggaaaagaaaacttagacatactttatgaattagctgaaattataggtggagaagtttctggttctcgtgccactatagatgcaggttggttagataaagcaagacaagttggtcaaactggtaaaactgtaagaccagacctttatatagcatgtggtatatctggagcaatacaacatatagctggtatggaagatgctgagtttatagttgctataaataaaaatccagaagctccaatatttaaatatgctgatgttggtatagttggagatgttcataaagtgcttccagaacttatcagtcagttaagtgttgcaaaagaaaaaggtgaagttttagctaactaataagaaggagatatacatatgagagaagtagtaattgccagtgcagctagaacagcagtaggaagttttggaggagcatttaaatcagtttcagcggtagagttaggggtaacagcagctaaagaagctataaaaagagctaacataactccagatatgatagatgaatctcttttagggggagtacttacagcaggtcttggacaaaatatagcaagacaaatagcattaggagcaggaataccagtagaaaaaccagctatgactataaatatagtttgtggttctggattaagatctgtttcaatggcatctcaacttatagcattaggtgatgctgatataatgttagttggtggagctgaaaacatgagtatgtctccttatttagtaccaagtgcgagatatggtgcaagaatgggtgatgctgcttttgttgattcaatgataaaagatggattatcagacatatttaataactatcacatgggtattactgctgaaaacatagcagagcaatggaatataactagagaagaacaagatgaattagctcttgcaagtcaaaataaagctgaaaaagctcaagctgaaggaaaatttgatgaagaaatagttcctgttgttataaaaggaagaaaaggtgacactgtagtagataaagatgaatatattaagcctggcactacaatggagaaacttgctaagttaagacctgcatttaaaaaagatggaacagttactgctggtaatgcatcaggaataaatgatggtgctgctatgttagtagtaatggctaaagaaaaagctgaagaactaggaatagagcctcttgcaactatagtttcttatggaacagctggtgttgaccctaaaataatgggatatggaccagttccagcaactaaaaaagctttagaagctgctaatatgactattgaagatatagatttagttgaagctaatgaggcatttgctgcccaatctgtagctgtaataagagacttaaatatagatatgaataaagttaatgttaatggtggagcaatagctataggacatccaataggatgctcaggagcaagaatacttactacacttttatatgaaatgaagagaagagatgctaaaactggtcttgctacactttgtataggcggtggaatgggaactactttaatagttaagagatagtaagaaggagatatacatatgaaattagctgtaataggtagtggaactatgggaagtggtattgtacaaacttttgcaagttgtggacatgatgtatgtttaaagagtagaactcaaggtgctatagataaatgtttagctttattagataaaaatttaactaagttagttactaagggaaaaatggatgaagctacaaaagcagaaatattaagtcatgttagttcaactactaattatgaagatttaaaagatatggatttaataatagaagcatctgtagaagacatgaatataaagaaagatgttttcaagttactagatgaattatgtaaagaagatactatcttggcaacaaatacttcatcattatctataacagaaatagcttcttctactaagcgcccagataaagttataggaatgcatttctttaatccagttcctatgatgaaattagttgaagttataagtggtcagttaacatcaaaagttacttttgatacagtatttgaattatctaagagtatcaataaagtaccagtagatgtatctgaatctcctggatttgtagtaaatagaatacttatacctatgataaatgaagctgttggtatatatgcagatggtgttgcaagtaaagaagaaatagatgaagctatgaaattaggagcaaaccatccaatgggaccactagcattaggtgatttaatcggattagatgttgttttagctataatgaacgttttatatactgaatttggagatactaaatatagacctcatccacttttagctaaaatggttagagctaatcaattaggaagaaaaactaagataggattctatgattataataaataataagaaggagatatacatatgagtacaagtgatgttaaagtttatgagaatgtagctgttgaagtagatggaaatatatgtacagtgaaaatgaatagacctaaagcccttaatgcaataaattcaaagactttagaagaactttatgaagtatttgtagatattaataatgatgaaactattgatgttgtaatattgacaggggaaggaaaggcatttgtagctggagcagatattgcatacatgaaagatttagatgctgtagctgctaaagattttagtatcttaggagcaaaagcttttggagaaatagaaaatagtaaaaaagtagtgatagctgctgtaaacggatttgctttaggtggaggatgtgaacttgcaatggcatgtgatataagaattgcatctgctaaagctaaatttggtcagccagaagtaactcttggaataactccaggatatggaggaactcaaaggcttacaagattggttggaatggcaaaagcaaaagaattaatctttacaggtcaagttataaaagctgatgaagctgaaaaaatagggctagtaaatagagtcgttgagccagacattttaatagaagaagttgagaaattagctaagataatagctaaaaatgctcagcttgcagttagatactctaaagaagcaatacaacttggtgctcaaactgatataaatactggaatagatatagaatctaatttatttggtctttgtttttcaactaaagaccaaaaagaaggaatgtcagctttcgttgaaaagagagaagctaactttataaaagggtaataagaaggagatatacatatgagaagttttgaagaagtaattaagtttgcaaaagaaagaggacctaaaactatatcagtagcatgttgccaagataaagaagttttaatggcagttgaaatggctagaaaagaaaaaatagcaaatgccattttagtaggagatatagaaaagactaaagaaattgcaaaaagcatagacatggatatcgaaaattatgaactgatagatataaaagatttagcagaagcatctctaaaatctgttgaattagtttcacaaggaaaagccgacatggtaatgaaaggcttagtagacacatcaataatactaaaagcagttttaaataaagaagtaggtcttagaactggaaatgtattaagtcacgtagcagtatttgatgtagagggatatgatagattatttttcgtaactgacgcagctatgaacttagctcctgatacaaatactaaaaagcaaatcatagaaaatgcttgcacagtagcacattcattagatataagtgaaccaaaagttgctgcaatatgcgcaaaagaaaaagtaaatccaaaaatgaaagatacagttgaagctaaagaactagaagaaatgtatgaaagaggagaaatcaaaggttgtatggttggtgggccttttgcaattgataatgcagtatctttagaagcagctaaacataaaggtataaatcatcctgtagcaggacgagctgatatattattagccccagatattgaaggtggtaacatattatataaagctttggtattcttctcaaaatcaaaaaatgcaggagttatagttggggctaaagcaccaataatattaacttctagagcagacagtgaagaaactaaactaaactcaatagctttaggtgttttaatggcagcaaaggcataataagaaggagatatacatatgagcaaaatatttaaaatcttaacaataaatcctggttcgacatcaactaaaatagctgtatttgataatgaggatttagtatttgaaaaaactttaagacattcttcagaagaaataggaaaatatgagaaggtgtctgaccaatttgaatttcgtaaacaagtaatagaagaagctctaaaagaaggtggagtaaaaacatctgaattagatgctgtagtaggtagaggaggacttcttaaacctataaaaggtggtacttattcagtaagtgctgctatgattgaagatttaaaagtgggagttttaggagaacacgcttcaaacctaggtggaataatagcaaaacaaataggtgaagaagtaaatgttccttcatacatagtagaccctgttgttgtagatgaattagaagatgttgctagaatttctggtatgcctgaaataagtagagcaagtgtagtacatgctttaaatcaaaaggcaatagcaagaagatatgctagagaaataaacaagaaatatgaagatataaatcttatagttgcacacatgggtggaggagtttctgttggagctcataaaaatggtaaaatagtagatgttgcaaacgcattagatggagaaggacctttctctccagaaagaagtggtggactaccagtaggtgcattagtaaaaatgtgctttagtggaaaatatactcaagatgaaattaaaaagaaaataaaaggtaatggcggactagttgcatacttaaacactaatgatgctagagaagttgaagaaagaattgaagctggtgatgaaaaagctaaattagtatatgaagctatggcatatcaaatctctaaagaaataggagctagtgctgcagttcttaagggagatgtaaaagcaatattattaactggtggaatcgcatattcaaaaatgtttacagaaatgattgcagatagagttaaatttatagcagatgtaaaagtttatccaggtgaagatgaaatgattgcattagctcaaggtggacttagagttttaactggtgaagaagaggctcaagtttatgataactaataa

SEQ ID NO: 115 - DNA, 6090 bp, Artificial Sequence
  Synthetic
atgatcgtaaaacctatggtacgcaacaatatctgcctgaacgcccatcctcagggctgcaagaagggagtggaagatcagattgaatataccaagaaacgcattaccgcagaagtcaaagctggcgcaaaagctccaaaaaacgttctggtgcttggctgctcaaatggttacggcctggcgagccgcattactgctgcgttcggatacggggctgcgaccatcggcgtgtcctttgaaaaagcgggttcagaaaccaaatatggtacaccgggatggtacaataatttggcatttgatgaagcggcaaaacgcgagggtctttatagcgtgacgatcgacggcgatgcgttttcagacgagatcaaggcccaggtaattgaggaagccaaaaaaaaaggtatcaaatttgatctgatcgtatacagcttggccagcccagtacgtactgatcctgatacaggtatcatgcacaaaagcgttttgaaaccctttggaaaaacgttcacaggcaaaacagtagatccgtttactggcgagctgaaggaaatctccgcggaaccagcaaatgacgaggaagcagccgccactgttaaagttatggggggtgaagattgggaacgttggattaagcagctgtcgaaggaaggcctcttagaagaaggctgtattaccttggcctatagttatattggccctgaagctacccaagctttgtaccgtaaaggcacaatcggcaaggccaaagaacacctggaggccacagcacaccgtctcaacaaagagaacccgtcaatccgtgccttcgtgagcgtgaataaaggcctggtaacccgcgcaagcgccgtaatcccggtaatccctctgtatctcgccagcttgttcaaagtaatgaaagagaagggcaatcatgaaggttgtattgaacagatcacgcgtctgtacgccgagcgcctgtaccgtaaagatggtacaattccagttgatgaggaaaatcgcattcgcattgatgattgggagttagaagaagacgtccagaaagcggtatccgcgttgatggagaaagtcacgggtgaaaacgcagaatctctcactgacttagcggggtaccgccatgatttcttagctagtaacggctttgatgtagaaggtattaattatgaagcggaagttgaacgcttcgaccgtatctgataagaaggagatatacatatgagagaagtagtaattgccagtgcagctagaacagcagtaggaagttttggaggagcatttaaatcagtttcagcggtagagttaggggtaacagcagctaaagaagctataaaaagagctaacataactccagatatgatagatgaatctcttttagggggagtacttacagcaggtcttggacaaaatatagcaagacaaatagcattaggagcaggaataccagtagaaaaaccagctatgactataaatatagtttgtggttctggattaagatctgtttcaatggcatctcaacttatagcattaggtgatgctgatataatgttagttggtggagctgaaaacatgagtatgtctccttatttagtaccaagtgcgagatatggtgcaagaatgggtgatgctgcttttgttgattcaatgataaaagatggattatcagacatatttaataactatcacatgggtattactgctgaaaacatagcagagcaatggaatataactagagaagaacaagatgaattagctcttgcaagtcaaaataaagctgaaaaagctcaagctgaaggaaaatttgatgaagaaatagttcctgttgttataaaaggaagaaaaggtgacactgtagtagataaagatgaatatattaagcctggcactacaatggagaaacttgctaagttaagacctgcatttaaaaaagatggaacagttactgctggtaatgcatcaggaataaatgatggtgctgctatgttagtagtaatggctaaagaaaaagctgaagaactaggaatagagcctcttgcaactatagtttcttatggaacagctggtgttgaccctaaaataatgggatatggaccagttccagcaactaaaaaagctttagaagctgctaatatgactattgaagatatagatttagttgaagctaatgaggcatttgctgcccaatctgtagctgtaataagagacttaaatatagatatgaataaagttaatgttaatggtggagcaatagctataggacatccaataggatgctcaggagcaagaatacttactacacttttatatgaaatgaagagaagagatgctaaaactggtcttgctacactttgtataggcggtggaatgggaactactttaatagttaagagatagtaagaaggagatatacatatgaaattagctgtaataggtagtggaactatgggaagtggtattgtacaaacttttgcaagttgtggacatgatgtatgtttaaagagtagaactcaaggtgctatagataaatgtttagctttattagataaaaatttaactaagttagttactaagggaaaaatggatgaagctacaaaagcagaaatattaagtcatgttagttcaactactaattatgaagatttaaaagatatggatttaataatagaagcatctgtagaagacatgaatataaagaaagatgttttcaagttactagatgaattatgtaaagaagatactatcttggcaacaaatacttcatcattatctataacagaaatagcttcttctactaagcgcccagataaagttataggaatgcatttctttaatccagttcctatgatgaaattagttgaagttataagtggtcagttaacatcaaaagttacttttgatacagtatttgaattatctaagagtatcaataaagtaccagtagatgtatctgaatctcctggatttgtagtaaatagaatacttatacctatgataaatgaagctgttggtatatatgcagatggtgttgcaagtaaagaagaaatagatgaagctatgaaattaggagcaaaccatccaatgggaccactagcattaggtgatttaatcggattagatgttgttttagctataatgaacgttttatatactgaatttggagatactaaatatagacctcatccacttttagctaaaatggttagagctaatcaattaggaagaaaaactaagataggattctatgattataataaataataagaaggagatatacatatgagtacaagtgatgttaaagtttatgagaatgtagctgttgaagtagatggaaatatatgtacagtgaaaatgaatagacctaaagcccttaatgcaataaattcaaagactttagaagaactttatgaagtatttgtagatattaataatgatgaaactattgatgttgtaatattgacaggggaaggaaaggcatttgtagctggagcagatattgcatacatgaaagatttagatgctgtagctgctaaagattttagtatcttaggagcaaaagcttttggagaaatagaaaatagtaaaaaagtagtgatagctgctgtaaacggatttgctttaggtggaggatgtgaacttgcaatggcatgtgatataagaattgcatctgctaaagctaaatttggtcagccagaagtaactcttggaataactccaggatatggaggaactcaaaggcttacaagattggttggaatggcaaaagcaaaagaattaatctttacaggtcaagttataaaagctgatgaagctgaaaaaatagggctagtaaatagagtcgttgagccagacattttaatagaagaagttgagaaattagctaagataatagctaaaaatgctcagcttgcagttagatactctaaagaagcaatacaacttggtgctcaaactgatataaatactggaatagatatagaatctaatttatttggtctttgtttttcaactaaagaccaaaaagaaggaatgtcagctttcgttgaaaagagagaagctaactttataaaagggtaataagaaggagatatacatatgagaagttttgaagaagtaattaagtttgcaaaagaaagaggacctaaaactatatcagtagcatgttgccaagataaagaagttttaatggcagttgaaatggctagaaaagaaaaaatagcaaatgccattttagtaggagatatagaaaagactaaagaaattgcaaaaagcatagacatggatatcgaaaattatgaactgatagatataaaagatttagcagaagcatctctaaaatctgttgaattagtttcacaaggaaaagccgacatggtaatgaaaggcttagtagacacatcaataatactaaaagcagttttaaataaagaagtaggtcttagaactggaaatgtattaagtcacgtagcagtatttgatgtagagggatatgatagattatttttcgtaactgacgcagctatgaacttagctcctgatacaaatactaaaaagcaaatcatagaaaatgcttgcacagtagcacattcattagatataagtgaaccaaaagttgctgcaatatgcgcaaaagaaaaagtaaatccaaaaatgaaagatacagttgaagctaaagaactagaagaaatgtatgaaagaggagaaatcaaaggttgtatggttggtgggccttttgcaattgataatgcagtatctttagaagcagctaaacataaaggtataaatcatcctgtagcaggacgagctgatatattattagccccagatattgaaggtggtaacatattatataaagctttggtattcttctcaaaatcaaaaaatgcaggagttatagttggggctaaagcaccaataatattaacttctagagcagacagtgaagaaactaaactaaactcaatagctttaggtgttttaatggcagcaaaggcataataagaaggagatatacatatgagcaaaatatttaaaatcttaacaataaatcctggttcgacatcaactaaaatagctgtatttgataatgaggatttagtatttgaaaaaactttaagacattcttcagaagaaataggaaaatatgagaaggtgtctgaccaatttgaatttcgtaaacaagtaatagaagaagctctaaaagaaggtggagtaaaaacatctgaattagatgctgtagtaggtagaggaggacttcttaaacctataaaaggtggtacttattcagtaagtgctgctatgattgaagatttaaaagtgggagttttaggagaacacgcttcaaacctaggtggaataatagcaaaacaaataggtgaagaagtaaatgttccttcatacatagtagaccctgttgttgtagatgaattagaagatgttgctagaatttctggtatgcctgaaataagtagagcaagtgtagtacatgctttaaatcaaaaggcaatagcaagaagatatgctagagaaataaacaagaaatatgaagatataaatcttatagttgcacacatgggtggaggagtttctgttggagctcataaaaatggtaaaatagtagatgttgcaaacgcattagatggagaaggacctttctctccagaaagaagtggtggactaccagtaggtgcattagtaaaaatgtgctttagtggaaaatatactcaagatgaaattaaaaagaaaataaaaggtaatggcggactagttgcatacttaaacactaatgatgctagagaagttgaagaaagaattgaagctggtgatgaaaaagctaaattagtatatgaagctatggcatatcaaatctctaaagaaataggagctagtgctgcagttcttaagggagatgtaaaagcaatattattaactggtggaatcgcatattcaaaaatgtttacagaaatgattgcagatagagttaaatttatagcagatgtaaaagtttatccaggtgaagatgaaatgattgcattagctcaaggtggacttagagttttaactggtgaagaagaggctcaagtttatgataactaataa

SEQ ID NO: 116 - DNA, 4947 bp, Artificial Sequence
  Synthetic
atgatcgtaaaacctatggtacgcaacaatatctgcctgaacgcccatcctcagggctgcaagaagggagtggaagatcagattgaatataccaagaaacgcattaccgcagaagtcaaagctggcgcaaaagctccaaaaaacgttctggtgcttggctgctcaaatggttacggcctggcgagccgcattactgctgcgttcggatacggggctgcgaccatcggcgtgtcctttgaaaaagcgggttcagaaaccaaatatggtacaccgggatggtacaataatttggcatttgatgaagcggcaaaacgcgagggtctttatagcgtgacgatcgacggcgatgcgttttcagacgagatcaaggcccaggtaattgaggaagccaaaaaaaaaggtatcaaatttgatctgatcgtatacagcttggccagcccagtacgtactgatcctgatacaggtatcatgcacaaaagcgttttgaaaccctttggaaaaacgttcacaggcaaaacagtagatccgtttactggcgagctgaaggaaatctccgcggaaccagcaaatgacgaggaagcagccgccactgttaaagttatggggggtgaagattgggaacgttggattaagcagctgtcgaaggaaggcctcttagaagaaggctgtattaccttggcctatagttatattggccctgaagctacccaagctttgtaccgtaaaggcacaatcggcaaggccaaagaacacctggaggccacagcacaccgtctcaacaaagagaacccgtcaatccgtgccttcgtgagcgtgaataaaggcctggtaacccgcgcaagcgccgtaatcccggtaatccctctgtatctcgccagcttgttcaaagtaatgaaagagaagggcaatcatgaaggttgtattgaacagatcacgcgtctgtacgccgagcgcctgtaccgtaaagatggtacaattccagttgatgaggaaaatcgcattcgcattgatgattgggagttagaagaagacgtccagaaagcggtatccgcgttgatggagaaagtcacgggtgaaaacgcagaatctctcactgacttagcggggtaccgccatgatttcttagctagtaacggctttgatgtagaaggtattaattatgaagcggaagttgaacgcttcgaccgtatctgataagaaggagatatacatatgagagaagtagtaattgccagtgcagctagaacagcagtaggaagttttggaggagcatttaaatcagtttcagcggtagagttaggggtaacagcagctaaagaagctataaaaagagctaacataactccagatatgatagatgaatctcttttagggggagtacttacagcaggtcttggacaaaatatagcaagacaaatagcattaggagcaggaataccagtagaaaaaccagctatgactataaatatagtttgtggttctggattaagatctgtttcaatggcatctcaacttatagcattaggtgatgctgatataatgttagttggtggagctgaaaacatgagtatgtctccttatttagtaccaagtgcgagatatggtgcaagaatgggtgatgctgcttttgttgattcaatgataaaagatggattatcagacatatttaataactatcacatgggtattactgctgaaaacatagcagagcaatggaatataactagagaagaacaagatgaattagctcttgcaagtcaaaataaagctgaaaaagctcaagctgaaggaaaatttgatgaagaaatagttcctgttgttataaaaggaagaaaaggtgacactgtagtagataaagatgaatatattaagcctggcactacaatggagaaacttgctaagttaagacctgcatttaaaaaagatggaacagttactgctggtaatgcatcaggaataaatgatggtgctgctatgttagtagtaatggctaaagaaaaagctgaagaactaggaatagagcctcttgcaactatagtttcttatggaacagctggtgttgaccctaaaataatgggatatggaccagttccagcaactaaaaaagctttagaagctgctaatatgactattgaagatatagatttagttgaagctaatgaggcatttgctgcccaatctgtagctgtaataagagacttaaatatagatatgaataaagttaatgttaatggtggagcaatagctataggacatccaataggatgctcaggagcaagaatacttactacacttttatatgaaatgaagagaagagatgctaaaactggtcttgctacactttgtataggcggtggaatgggaactactttaatagttaagagatagtaagaaggagatatacatatgaaattagctgtaataggtagtggaactatgggaagtggtattgtacaaacttttgcaagttgtggacatgatgtatgtttaaagagtagaactcaaggtgctatagataaatgtttagctttattagataaaaatttaactaagttagttactaagggaaaaatggatgaagctacaaaagcagaaatattaagtcatgttagttcaactactaattatgaagatttaaaagatatggatttaataatagaagcatctgtagaagacatgaatataaagaaagatgttttcaagttactagatgaattatgtaaagaagatactatcttggcaacaaatacttcatcattatctataacagaaatagcttcttctactaagcgcccagataaagttataggaatgcatttctttaatccagttcctatgatgaaattagttgaagttataagtggtcagttaacatcaaaagttacttttgatacagtatttgaattatctaagagtatcaataaagtaccagtagatgtatctgaatctcctggatttgtagtaaatagaatacttatacctatgataaatgaagctgttggtatatatgcagatggtgttgcaagtaaagaagaaatagatgaagctatgaaattaggagcaaaccatccaatgggaccactagcattaggtgatttaatcggattagatgttgttttagctataatgaacgttttatatactgaatttggagatactaaatatagacctcatccacttttagctaaaatggttagagctaatcaattaggaagaaaaactaagataggattctatgattataataaataataagaaggagatatacatatgagtacaagtgatgttaaagtttatgagaatgtagctgttgaagtagatggaaatatatgtacagtgaaaatgaatagacctaaagcccttaatgcaataaattcaaagactttagaagaactttatgaagtatttgtagatattaataatgatgaaactattgatgttgtaatattgacaggggaaggaaaggcatttgtagctggagcagatattgcatacatgaaagatttagatgctgtagctgctaaagattttagtatcttaggagcaaaagcttttggagaaatagaaaatagtaaaaaagtagtgatagctgctgtaaacggatttgctttaggtggaggatgtgaacttgcaatggcatgtgatataagaattgcatctgctaaagctaaatttggtcagccagaagtaactcttggaataactccaggatatggaggaactcaaaggcttacaagattggttggaatggcaaaagcaaaagaattaatctttacaggtcaagttataaaagctgatgaagctgaaaaaatagggctagtaaatagagtcgttgagccagacattttaatagaagaagttgagaaattagctaagataatagctaaaaatgctcagcttgcagttagatactctaaagaagcaatacaacttggtgctcaaactgatataaatactggaatagatatagaatctaatttatttggtctttgtttttcaactaaagaccaaaaagaaggaatgtcagctttcgttgaaaagagagaagctaactttataaaagggtaataagaaggagatatacatatgagtcaggcgctaaaaaatttactgacattgttaaatctggaaaaaattgaggaaggactctttcgcggccagagtgaagatttaggtttacgccaggtgtttggcggccaggtcgtgggtcaggccttgtatgctgcaaaagagaccgtccctgaagagcggctggtacattcgtttcacagctactttcttcgccctggcgatagtaagaagccgattatttatgatgtcgaaacgctgcgtgacggtaacagcttcagcgcccgccgggttgctgctattcaaaacggcaaaccgattttttatatgactgcctctttccaggcaccagaagcgggtttcgaacatcaaaaaacaatgccgtccgcgccagcgcctgatggcctcccttcggaaacgcaaatcgcccaatcgctggcgcacctgctgccgccagtgctgaaagataaattcatctgcgatcgtccgctggaagtccgtccggtggagtttcataacccactgaaaggtcacgtcgcagaaccacatcgtcaggtgtggatccgcgcaaatggtagcgtgccggatgacctgcgcgttcatcagtatctgctcggttacgcttctgatcttaacttcctgccggtagctctacagccgcacggcatcggttttctcgaaccggggattcagattgccaccattgaccattccatgtggttccatcgcccgtttaatttgaatgaatggctgctgtatagcgtggagagcacctcggcgtccagcgcacgtggctttgtgcgcggtgagttttatacccaagacggcgtactggttgcctcgaccgttcaggaaggggtgatgcgtaatcacaattaa

SEQ ID NO: 117 - DNA, 8575 bp, Artificial Sequence
  Synthetic
ttattatcgcaccgcaatcgggattttcgattcataaagcaggtcgtaggtcggcttgttgagcaggtcttgcagcgtgaaaccgtccagatacgtgaaaaacgacttcattgcaccgccgagtatgcccgtcagccggcaggacggcgtaatcaggcattcgttgttcgggcccatacactcgaccagctgcatcggttcgaggtggcggacgaccgcgccgatattgatgcgttcgggcggcgcggccagcctcagcccgccgcctttcccgcgtacgctgtgcaagaacccgcctttgaccagcgcggtaaccactttcatcaaatggcttttggaaatgccgtaggtcgaggcgatggtggcgatattgaccagcgcgtcgtcgttgacggcggtgtagatgaggacgcgcagcccgtagtcggtatgttgggtcagatacatacaacctccttagtacatgcaaaattatttctagagcaacatacgagccggaagcataaagtgtaaagcctggggtgcctaatgagttgagttgaggaattataacaggaagaaatattcctcatacgcttgtaattcctctatggttgttgacaattaatcatcggctcgtataatgtataacattcatattttgtgaattttaaactctagaaataattttgtttaactttaagaaggagatatacatatggatttaaattctaaaaaatatcagatgcttaaagagctatatgtaagcttcgctgaaaatgaagttaaacctttagcaacagaacttgatgaagaagaaagatttccttatgaaacagtggaaaaaatggcaaaagcaggaatgatgggtataccatatccaaaagaatatggtggagaaggtggagacactgtaggatatataatggcagttgaagaattgtctagagtttgtggtactacaggagttatattatcagctcatacatctcttggctcatggcctatatatcaatatggtaatgaagaacaaaaacaaaaattcttaagaccactagcaagtggagaaaaattaggagcatttggtcttactgagcctaatgctggtacagatgcgtctggccaacaaacaactgctgttttagacggggatgaatacatacttaatggctcaaaaatatttataacaaacgcaatagctggtgacatatatgtagtaatggcaatgactgataaatctaaggggaacaaaggaatatcagcatttatagttgaaaaaggaactcctgggtttagctttggagttaaagaaaagaaaatgggtataagaggttcagctacgagtgaattaatatttgaggattgcagaatacctaaagaaaatttacttggaaaagaaggtcaaggatttaagatagcaatgtctactcttgatggtggtagaattggtatagctgcacaagctttaggtttagcacaaggtgctcttgatgaaactgttaaatatgtaaaagaaagagtacaatttggtagaccattatcaaaattccaaaatacacaattccaattagctgatatggaagttaaggtacaagcggctagacaccttgtatatcaagcagctataaataaagacttaggaaaaccttatggagtagaagcagcaatggcaaaattatttgcagctgaaacagctatggaagttactacaaaagctgtacaacttcatggaggatatggatacactcgtgactatccagtagaaagaatgatgagagatgctaagataactgaaatatatgaaggaactagtgaagttcaaagaatggttatttcaggaaaactattaaaatagtaagaaggagatatacatatggaggaaggatttatgaatatagtcgtttgtataaaacaagttccagatacaacagaagttaaactagatcctaatacaggtactttaattagagatggagtaccaagtataataaaccctgatgataaagcaggtttagaagaagctataaaattaaaagaagaaatgggtgctcatgtaactgttataacaatgggacctcctcaagcagatatggctttaaaagaagctttagcaatgggtgcagatagaggtatattattaacagatagagcatttgcgggtgctgatacttgggcaacttcatcagcattagcaggagcattaaaaaatatagattttgatattataatagctggaagacaggcgatagatggagatactgcacaagttggacctcaaatagctgaacatttaaatcttccatcaataacatatgctgaagaaataaaaactgaaggtgaatatgtattagtaaaaagacaatttgaagattgttgccatgacttaaaagttaaaatgccatgccttataacaactcttaaagatatgaacacaccaagatacatgaaagttggaagaatatatgatgctttcgaaaatgatgtagtagaaacatggactgtaaaagatatagaagttgacccttctaatttaggtcttaaaggttctccaactagtgtatttaaatcatttacaaaatcagttaaaccagctggtacaatatacaatgaagatgcgaaaacatcagctggaattatcatagataaattaaaagagaagtatatcatataataagaaggagatatacatatgggtaacgttttagtagtaatagaacaaagagaaaatgtaattcaaactgtttctttagaattactaggaaaggctacagaaatagcaaaagattatgatacaaaagtttctgcattacttttaggtagtaaggtagaaggtttaatagatacattagcacactatggtgcagatgaggtaatagtagtagatgatgaagctttagcagtgtatacaactgaaccatatacaaaagcagcttatgaagcaataaaagcagctgaccctatagttgtattatttggtgcaacttcaataggtagagatttagcgcctagagtttctgctagaatacatacaggtcttactgctgactgtacaggtcttgcagtagctgaagatacaaaattattattaatgacaagacctgcctttggtggaaatataatggcaacaatagtttgtaaagatttcagacctcaaatgtctacagttagaccaggggttatgaagaaaaatgaacctgatgaaactaaagaagctgtaattaaccgtttcaaggtagaatttaatgatgctgataaattagttcaagttgtacaagtaataaaagaagctaaaaaacaagttaaaatagaagatgctaagatattagtttctgctggacgtggaatgggtggaaaagaaaacttagacatactttatgaattagctgaaattataggtggagaagtttctggttctcgtgccactatagatgcaggttggttagataaagcaagacaagttggtcaaactggtaaaactgtaagaccagacctttatatagcatgtggtatatctggagcaatacaacatatagctggtatggaagatgctgagtttatagttgctataaataaaaatccagaagctccaatatttaaatatgctgatgttggtatagttggagatgttcataaagtgcttccagaacttatcagtcagttaagtgttgcaaaagaaaaaggtgaagttttagctaactaataagaaggagatatacatatgagagaagtagtaattgccagtgcagctagaacagcagtaggaagttttggaggagcatttaaatcagtttcagcggtagagttaggggtaacagcagctaaagaagctataaaaagagctaacataactccagatatgatagatgaatctcttttagggggagtacttacagcaggtcttggacaaaatatagcaagacaaatagcattaggagcaggaataccagtagaaaaaccagctatgactataaatatagtttgtggttctggattaagatctgtttcaatggcatctcaacttatagcattaggtgatgctgatataatgttagttggtggagctgaaaacatgagtatgtctccttatttagtaccaagtgcgagatatggtgcaagaatgggtgatgctgcttttgttgattcaatgataaaagatggattatcagacatatttaataactatcacatgggtattactgctgaaaacatagcagagcaatggaatataactagagaagaacaagatgaattagctcttgcaagtcaaaataaagctgaaaaagctcaagctgaaggaaaatttgatgaagaaatagttcctgttgttataaaaggaagaaaaggtgacactgtagtagataaagatgaatatattaagcctggcactacaatggagaaacttgctaagttaagacctgcatttaaaaaagatggaacagttactgctggtaatgcatcaggaataaatgatggtgctgctatgttagtagtaatggctaaagaaaaagctgaagaactaggaatagagcctcttgcaactatagtttcttatggaacagctggtgttgaccctaaaataatgggatatggaccagttccagcaactaaaaaagctttagaagctgctaatatgactattgaagatatagatttagttgaagctaatgaggcatttgctgcccaatctgtagctgtaataagagacttaaatatagatatgaataaagttaatgttaatggtggagcaatagctataggacatccaataggatgctcaggagcaagaatacttactacacttttatatgaaatgaagagaagagatgctaaaactggtcttgctacactttgtataggcggtggaatgggaactactttaatagttaagagatagtaagaaggagatatacatatgaaattagctgtaataggtagtggaactatgggaagtggtattgtacaaacttttgcaagttgtggacatgatgtatgtttaaagagtagaactcaaggtgctatagataaatgtttagctttattagataaaaatttaactaagttagttactaagggaaaaatggatgaagctacaaaagcagaaatattaagtcatgttagttcaactactaattatgaagatttaaaagatatggatttaataatagaagcatctgtagaagacatgaatataaagaaagatgttttcaagttactagatgaattatgtaaagaagatactatcttggcaacaaatacttcatcattatctataacagaaatagcttcttctactaagcgcccagataaagttataggaatgcatttctttaatccagttcctatgatgaaattagttgaagttataagtggtcagttaacatcaaaagttacttttgatacagtatttgaattatctaagagtatcaataaagtaccagtagatgtatctgaatctcctggatttgtagtaaatagaatacttatacctatgataaatgaagctgttggtatatatgcagatggtgttgcaagtaaagaagaaatagatgaagctatgaaattaggagcaaaccatccaatgggaccactagcattaggtgatttaatcggattagatgttgttttagctataatgaacgttttatatactgaatttggagatactaaatatagacctcatccacttttagctaaaatggttagagctaatcaattaggaagaaaaactaagataggattctatgattataataaataataagaaggagatatacatatgagtacaagtgatgttaaagtttatgagaatgtagctgttgaagtagatggaaatatatgtacagtgaaaatgaatagacctaaagcccttaatgcaataaattcaaagactttagaagaactttatgaagtatttgtagatattaataatgatgaaactattgatgttgtaatattgacaggggaaggaaaggcatttgtagctggagcagatattgcatacatgaaagatttagatgctgtagctgctaaagattttagtatcttaggagcaaaagcttttggagaaatagaaaatagtaaaaaagtagtgatagctgctgtaaacggatttgctttaggtggaggatgtgaacttgcaatggcatgtgatataagaattgcatctgctaaagctaaatttggtcagccagaagtaactcttggaataactccaggatatggaggaactcaaaggcttacaagattggttggaatggcaaaagcaaaagaattaatctttacaggtcaagttataaaagctgatgaagctgaaaaaatagggctagtaaatagagtcgttgagccagacattttaatagaagaagttgagaaattagctaagataatagctaaaaatgctcagcttgcagttagatactctaaagaagcaatacaacttggtgctcaaactgatataaatactggaatagatatagaatctaatttatttggtctttgtttttcaactaaagaccaaaaagaaggaatgtcagctttcgttgaaaagagagaagctaactttataaaagggtaataagaaggagatatacatatgagaagttttgaagaagtaattaagtttgcaaaagaaagaggacctaaaactatatcagtagcatgttgccaagataaagaagttttaatggcagttgaaatggctagaaaagaaaaaatagcaaatgccattttagtaggagatatagaaaagactaaagaaattgcaaaaagcatagacatggatatcgaaaattatgaactgatagatataaaagatttagcagaagcatctctaaaatctgttgaattagtttcacaaggaaaagccgacatggtaatgaaaggcttagtagacacatcaataatactaaaagcagttttaaataaagaagtaggtcttagaactggaaatgtattaagtcacgtagcagtatttgatgtagagggatatgatagattatttttcgtaactgacgcagctatgaacttagctcctgatacaaatactaaaaagcaaatcatagaaaatgcttgcacagtagcacattcattagatataagtgaaccaaaagttgctgcaatatgcgcaaaagaaaaagtaaatccaaaaatgaaagatacagttgaagctaaagaactagaagaaatgtatgaaagaggagaaatcaaaggttgtatggttggtgggccttttgcaattgataatgcagtatctttagaagcagctaaacataaaggtataaatcatcctgtagcaggacgagctgatatattattagccccagatattgaaggtggtaacatattatataaagctttggtattcttctcaaaatcaaaaaatgcaggagttatagttggggctaaagcaccaataatattaacttctagagcagacagtgaagaaactaaactaaactcaatagctttaggtgttttaatggcagcaaaggcataataagaaggagatatacatatgagcaaaatatttaaaatcttaacaataaatcctggttcgacatcaactaaaatagctgtatttgataatgaggatttagtatttgaaaaaactttaagacattcttcagaagaaataggaaaatatgagaaggtgtctgaccaatttgaatttcgtaaacaagtaatagaagaagctctaaaagaaggtggagtaaaaacatctgaattagatgctgtagtaggtagaggaggacttcttaaacctataaaaggtggtacttattcagtaagtgctgctatgattgaagatttaaaagtgggagttttaggagaacacgcttcaaacctaggtggaataatagcaaaacaaataggtgaagaagtaaatgttccttcatacatagtagaccctgttgttgtagatgaattagaagatgttgctagaatttctggtatgcctgaaataagtagagcaagtgtagtacatgctttaaatcaaaaggcaatagcaagaagatatgctagagaaataaacaagaaatatgaagatataaatcttatagttgcacacatgggtggaggagtttctgttggagctcataaaaatggtaaaatagtagatgttgcaaacgcattagatggagaaggacctttctctccagaaagaagtggtggactaccagtaggtgcattagtaaaaatgtgctttagtggaaaatatactcaagatgaaattaaaaagaaaataaaaggtaatggcggactagttgcatacttaaacactaatgatgctagagaagttgaagaaagaattgaagctggtgatgaaaaagctaaattagtatatgaagctatggcatatcaaatctctaaagaaataggagctagtgctgcagttcttaagggagatgtaaaagcaatattattaactggtggaatcgcatattcaaaaatgtttacagaaatgattgcagatagagttaaatttatagcagatgtaaaagtttatccaggtgaagatgaaatgattgcattagctcaaggtggacttagagttttaactggtgaagaagaggctcaagtttatgataactaataa

SEQ ID NO: 118 - DNA, 6787 bp, Artificial Sequence
  Synthetic
ttattatcgcaccgcaatcgggattttcgattcataaagcaggtcgtaggtcggcttgttgagcaggtcttgcagcgtgaaaccgtccagatacgtgaaaaacgacttcattgcaccgccgagtatgcccgtcagccggcaggacggcgtaatcaggcattcgttgttcgggcccatacactcgaccagctgcatcggttcgaggtggcggacgaccgcgccgatattgatgcgttcgggcggcgcggccagcctcagcccgccgcctttcccgcgtacgctgtgcaagaacccgcctttgaccagcgcggtaaccactttcatcaaatggcttttggaaatgccgtaggtcgaggcgatggtggcgatattgaccagcgcgtcgtcgttgacggcggtgtagatgaggacgcgcagcccgtagtcggtatgttgggtcagatacatacaacctccttagtacatgcaaaattatttctagagcaacatacgagccggaagcataaagtgtaaagcctggggtgcctaatgagttgagttgaggaattataacaggaagaaatattcctcatacgcttgtaattcctctatggttgttgacaattaatcatcggctcgtataatgtataacattcatattttgtgaattttaaactctagaaataattttgtttaactttaagaaggagatatacatatgatcgtaaaacctatggtacgcaacaatatctgcctgaacgcccatcctcagggctgcaagaagggagtggaagatcagattgaatataccaagaaacgcattaccgcagaagtcaaagctggcgcaaaagctccaaaaaacgttctggtgcttggctgctcaaatggttacggcctggcgagccgcattactgctgcgttcggatacggggctgcgaccatcggcgtgtcctttgaaaaagcgggttcagaaaccaaatatggtacaccgggatggtacaataatttggcatttgatgaagcggcaaaacgcgagggtctttatagcgtgacgatcgacggcgatgcgttttcagacgagatcaaggcccaggtaattgaggaagccaaaaaaaaaggtatcaaatttgatctgatcgtatacagcttggccagcccagtacgtactgatcctgatacaggtatcatgcacaaaagcgttttgaaaccctttggaaaaacgttcacaggcaaaacagtagatccgtttactggcgagctgaaggaaatctccgcggaaccagcaaatgacgaggaagcagccgccactgttaaagttatggggggtgaagattgggaacgttggattaagcagctgtcgaaggaaggcctcttagaagaaggctgtattaccttggcctatagttatattggccctgaagctacccaagctttgtaccgtaaaggcacaatcggcaaggccaaagaacacctggaggccacagcacaccgtctcaacaaagagaacccgtcaatccgtgccttcgtgagcgtgaataaaggcctggtaacccgcgcaagcgccgtaatcccggtaatccctctgtatctcgccagcttgttcaaagtaatgaaagagaagggcaatcatgaaggttgtattgaacagatcacgcgtctgtacgccgagcgcctgtaccgtaaagatggtacaattccagttgatgaggaaaatcgcattcgcattgatgattgggagttagaagaagacgtccagaaagcggtatccgcgttgatggagaaagtcacgggtgaaaacgcagaatctctcactgacttagcggggtaccgccatgatttcttagctagtaacggctttgatgtagaaggtattaattatgaagcggaagttgaacgcttcgaccgtatctgataagaaggagatatacatatgagagaagtagtaattgccagtgcagctagaacagcagtaggaagttttggaggagcatttaaatcagtttcagcggtagagttaggggtaacagcagctaaagaagctataaaaagagctaacataactccagatatgatagatgaatctcttttagggggagtacttacagcaggtcttggacaaaatatagcaagacaaatagcattaggagcaggaataccagtagaaaaaccagctatgactataaatatagtttgtggttctggattaagatctgtttcaatggcatctcaacttatagcattaggtgatgctgatataatgttagttggtggagctgaaaacatgagtatgtctccttatttagtaccaagtgcgagatatggtgcaagaatgggtgatgctgcttttgttgattcaatgataaaagatggattatcagacatatttaataactatcacatgggtattactgctgaaaacatagcagagcaatggaatataactagagaagaacaagatgaattagctcttgcaagtcaaaataaagctgaaaaagctcaagctgaaggaaaatttgatgaagaaatagttcctgttgttataaaaggaagaaaaggtgacactgtagtagataaagatgaatatattaagcctggcactacaatggagaaacttgctaagttaagacctgcatttaaaaaagatggaacagttactgctggtaatgcatcaggaataaatgatggtgctgctatgttagtagtaatggctaaagaaaaagctgaagaactaggaatagagcctcttgcaactatagtttcttatggaacagctggtgttgaccctaaaataatgggatatggaccagttccagcaactaaaaaagctttagaagctgctaatatgactattgaagatatagatttagttgaagctaatgaggcatttgctgcccaatctgtagctgtaataagagacttaaatatagatatgaataaagttaatgttaatggtggagcaatagctataggacatccaataggatgctcaggagcaagaatacttactacacttttatatgaaatgaagagaagagatgctaaaactggtcttgctacactttgtataggcggtggaatgggaactactttaatagttaagagatagtaagaaggagatatacatatgaaattagctgtaataggtagtggaactatgggaagtggtattgtacaaacttttgcaagttgtggacatgatgtatgtttaaagagtagaactcaaggtgctatagataaatgtttagctttattagataaaaatttaactaagttagttactaagggaaaaatggatgaagctacaaaagcagaaatattaagtcatgttagttcaactactaattatgaagatttaaaagatatggatttaataatagaagcatctgtagaagacatgaatataaagaaagatgttttcaagttactagatgaattatgtaaagaagatactatcttggcaacaaatacttcatcattatctataacagaaatagcttcttctactaagcgcccagataaagttataggaatgcatttctttaatccagttcctatgatgaaattagttgaagttataagtggtcagttaacatcaaaagttacttttgatacagtatttgaattatctaagagtatcaataaagtaccagtagatgtatctgaatctcctggatttgtagtaaatagaatacttatacctatgataaatgaagctgttggtatatatgcagatggtgttgcaagtaaagaagaaatagatgaagctatgaaattaggagcaaaccatccaatgggaccactagcattaggtgatttaatcggattagatgttgttttagctataatgaacgttttatatactgaatttggagatactaaatatagacctcatccacttttagctaaaatggttagagctaatcaattaggaagaaaaactaagataggattctatgattataataaataataagaaggagatatacatatgagtacaagtgatgttaaagtttatgagaatgtagctgttgaagtagatggaaatatatgtacagtgaaaatgaatagacctaaagcccttaatgcaataaattcaaagactttagaagaactttatgaagtatttgtagatattaataatgatgaaactattgatgttgtaatattgacaggggaaggaaaggcatttgtagctggagcagatattgcatacatgaaagatttagatgctgtagctgctaaagattttagtatcttaggagcaaaagcttttggagaaatagaaaatagtaaaaaagtagtgatagctgctgtaaacggatttgctttaggtggaggatgtgaacttgcaatggcatgtgatataagaattgcatctgctaaagctaaatttggtcagccagaagtaactcttggaataactccaggatatggaggaactcaaaggcttacaagattggttggaatggcaaaagcaaaagaattaatctttacaggtcaagttataaaagctgatgaagctgaaaaaatagggctagtaaatagagtcgttgagccagacattttaatagaagaagttgagaaattagctaagataatagctaaaaatgctcagcttgcagttagatactctaaagaagcaatacaacttggtgctcaaactgatataaatactggaatagatatagaatctaatttatttggtctttgtttttcaactaaagaccaaaaagaaggaatgtcagctttcgttgaaaagagagaagctaactttataaaagggtaataagaaggagatatacatatgagaagttttgaagaagtaattaagtttgcaaaagaaagaggacctaaaactatatcagtagcatgttgccaagataaagaagttttaatggcagttgaaatggctagaaaagaaaaaatagcaaatgccattttagtaggagatatagaaaagactaaagaaattgcaaaaagcatagacatggatatcgaaaattatgaactgatagatataaaagatttagcagaagcatctctaaaatctgttgaattagtttcacaaggaaaagccgacatggtaatgaaaggcttagtagacacatcaataatactaaaagcagttttaaataaagaagtaggtcttagaactggaaatgtattaagtcacgtagcagtatttgatgtagagggatatgatagattatttttcgtaactgacgcagctatgaacttagctcctgatacaaatactaaaaagcaaatcatagaaaatgcttgcacagtagcacattcattagatataagtgaaccaaaagttgctgcaatatgcgcaaaagaaaaagtaaatccaaaaatgaaagatacagttgaagctaaagaactagaagaaatgtatgaaagaggagaaatcaaaggttgtatggttggtgggccttttgcaattgataatgcagtatctttagaagcagctaaacataaaggtataaatcatcctgtagcaggacgagctgatatattattagccccagatattgaaggtggtaacatattatataaagctttggtattcttctcaaaatcaaaaaatgcaggagttatagttggggctaaagcaccaataatattaacttctagagcagacagtgaagaaactaaactaaactcaatagctttaggtgttttaatggcagcaaaggcataataagaaggagatatacatatgagcaaaatatttaaaatcttaacaataaatcctggttcgacatcaactaaaatagctgtatttgataatgaggatttagtatttgaaaaaactttaagacattcttcagaagaaataggaaaatatgagaaggtgtctgaccaatttgaatttcgtaaacaagtaatagaagaagctctaaaagaaggtggagtaaaaacatctgaattagatgctgtagtaggtagaggaggacttcttaaacctataaaaggtggtacttattcagtaagtgctgctatgattgaagatttaaaagtgggagttttaggagaacacgcttcaaacctaggtggaataatagcaaaacaaataggtgaagaagtaaatgttccttcatacatagtagaccctgttgttgtagatgaattagaagatgttgctagaatttctggtatgcctgaaataagtagagcaagtgtagtacatgctttaaatcaaaaggcaatagcaagaagatatgctagagaaataaacaagaaatatgaagatataaatcttatagttgcacacatgggtggaggagtttctgttggagctcataaaaatggtaaaatagtagatgttgcaaacgcattagatggagaaggacctttctctccagaaagaagtggtggactaccagtaggtgcattagtaaaaatgtgctttagtggaaaatatactcaagatgaaattaaaaagaaaataaaaggtaatggcggactagttgcatacttaaacactaatgatgctagagaagttgaagaaagaattgaagctggtgatgaaaaagctaaattagtatatgaagctatggcatatcaaatctctaaagaaataggagctagtgctgcagttcttaagggagatgtaaaagcaatattattaactggtggaatcgcatattcaaaaatgtttacagaaatgattgcagatagagttaaatttatagcagatgtaaaagtttatccaggtgaagatgaaatgattgcattagctcaaggtggacttagagttttaactggtgaagaagaggctcaagtttatgataactaataa

SEQ ID NO: 119 - DNA, 5644 bp, Artificial Sequence
  Synthetic
ttattatcgcaccgcaatcgggattttcgattcataaagcaggtcgtaggtcggcttgttgagcaggtcttgcagcgtgaaaccgtccagatacgtgaaaaacgacttcattgcaccgccgagtatgcccgtcagccggcaggacggcgtaatcaggcattcgttgttcgggcccatacactcgaccagctgcatcggttcgaggtggcggacgaccgcgccgatattgatgcgttcgggcggcgcggccagcctcagcccgccgcctttcccgcgtacgctgtgcaagaacccgcctttgaccagcgcggtaaccactttcatcaaatggcttttggaaatgccgtaggtcgaggcgatggtggcgatattgaccagcgcgtcgtcgttgacggcggtgtagatgaggacgcgcagcccgtagtcggtatgttgggtcagatacatacaacctccttagtacatgcaaaattatttctagagcaacatacgagccggaagcataaagtgtaaagcctggggtgcctaatgagttgagttgaggaattataacaggaagaaatattcctcatacgcttgtaattcctctatggttgttgacaattaatcatcggctcgtataatgtataacattcatattttgtgaattttaaactctagaaataattttgtttaactttaagaaggagatatacatatgatcgtaaaacctatggtacgcaacaatatctgcctgaacgcccatcctcagggctgcaagaagggagtggaagatcagattgaatataccaagaaacgcattaccgcagaagtcaaagctggcgcaaaagctccaaaaaacgttctggtgcttggctgctcaaatggttacggcctggcgagccgcattactgctgcgttcggatacggggctgcgaccatcggcgtgtcctttgaaaaagcgggttcagaaaccaaatatggtacaccgggatggtacaataatttggcatttgatgaagcggcaaaacgcgagggtctttatagcgtgacgatcgacggcgatgcgttttcagacgagatcaaggcccaggtaattgaggaagccaaaaaaaaaggtatcaaatttgatctgatcgtatacagcttggccagcccagtacgtactgatcctgatacaggtatcatgcacaaaagcgttttgaaaccctttggaaaaacgttcacaggcaaaacagtagatccgtttactggcgagctgaaggaaatctccgcggaaccagcaaatgacgaggaagcagccgccactgttaaagttatggggggtgaagattgggaacgttggattaagcagctgtcgaaggaaggcctcttagaagaaggctgtattaccttggcctatagttatattggccctgaagctacccaagctttgtaccgtaaaggcacaatcggcaaggccaaagaacacctggaggccacagcacaccgtctcaacaaagagaacccgtcaatccgtgccttcgtgagcgtgaataaaggcctggtaacccgcgcaagcgccgtaatcccggtaatccctctgtatctcgccagcttgttcaaagtaatgaaagagaagggcaatcatgaaggttgtattgaacagatcacgcgtctgtacgccgagcgcctgtaccgtaaagatggtacaattccagttgatgaggaaaatcgcattcgcattgatgattgggagttagaagaagacgtccagaaagcggtatccgcgttgatggagaaagtcacgggtgaaaacgcagaatctctcactgacttagcggggtaccgccatgatttcttagctagtaacggctttgatgtagaaggtattaattatgaagcggaagttgaacgcttcgaccgtatctgataagaaggagatatacatatgagagaagtagtaattgccagtgcagctagaacagcagtaggaagttttggaggagcatttaaatcagtttcagcggtagagttaggggtaacagcagctaaagaagctataaaaagagctaacataactccagatatgatagatgaatctcttttagggggagtacttacagcaggtcttggacaaaatatagcaagacaaatagcattaggagcaggaataccagtagaaaaaccagctatgactataaatatagtttgtggttctggattaagatctgtttcaatggcatctcaacttatagcattaggtgatgctgatataatgttagttggtggagctgaaaacatgagtatgtctccttatttagtaccaagtgcgagatatggtgcaagaatgggtgatgctgcttttgttgattcaatgataaaagatggattatcagacatatttaataactatcacatgggtattactgctgaaaacatagcagagcaatggaatataactagagaagaacaagatgaattagctcttgcaagtcaaaataaagctgaaaaagctcaagctgaaggaaaatttgatgaagaaatagttcctgttgttataaaaggaagaaaaggtgacactgtagtagataaagatgaatatattaagcctggcactacaatggagaaacttgctaagttaagacctgcatttaaaaaagatggaacagttactgctggtaatgcatcaggaataaatgatggtgctgctatgttagtagtaatggctaaagaaaaagctgaagaactaggaatagagcctcttgcaactatagtttcttatggaacagctggtgttgaccctaaaataatgggatatggaccagttccagcaactaaaaaagctttagaagctgctaatatgactattgaagatatagatttagttgaagctaatgaggcatttgctgcccaatctgtagctgtaataagagacttaaatatagatatgaataaagttaatgttaatggtggagcaatagctataggacatccaataggatgctcaggagcaagaatacttactacacttttatatgaaatgaagagaagagatgctaaaactggtcttgctacactttgtataggcggtggaatgggaactactttaatagttaagagatagtaagaaggagatatacatatgaaattagctgtaataggtagtggaactatgggaagtggtattgtacaaacttttgcaagttgtggacatgatgtatgtttaaagagtagaactcaaggtgctatagataaatgtttagctttattagataaaaatttaactaagttagttactaagggaaaaatggatgaagctacaaaagcagaaatattaagtcatgttagttcaactactaattatgaagatttaaaagatatggatttaataatagaagcatctgtagaagacatgaatataaagaaagatgttttcaagttactagatgaattatgtaaagaagatactatcttggcaacaaatacttcatcattatctataacagaaatagcttcttctactaagcgcccagataaagttataggaatgcatttctttaatccagttcctatgatgaaattagttgaagttataagtggtcagttaacatcaaaagttacttttgatacagtatttgaattatctaagagtatcaataaagtaccagtagatgtatctgaatctcctggatttgtagtaaatagaatacttatacctatgataaatgaagctgttggtatatatgcagatggtgttgcaagtaaagaagaaatagatgaagctatgaaattaggagcaaaccatccaatgggaccactagcattaggtgatttaatcggattagatgttgttttagctataatgaacgttttatatactgaatttggagatactaaatatagacctcatccacttttagctaaaatggttagagctaatcaattaggaagaaaaactaagataggattctatgattataataaataataagaaggagatatacatatgagtacaagtgatgttaaagtttatgagaatgtagctgttgaagtagatggaaatatatgtacagtgaaaatgaatagacctaaagcccttaatgcaataaattcaaagactttagaagaactttatgaagtatttgtagatattaataatgatgaaactattgatgttgtaatattgacaggggaaggaaaggcatttgtagctggagcagatattgcatacatgaaagatttagatgctgtagctgctaaagattttagtatcttaggagcaaaagcttttggagaaatagaaaatagtaaaaaagtagtgatagctgctgtaaacggatttgctttaggtggaggatgtgaacttgcaatggcatgtgatataagaattgcatctgctaaagctaaatttggtcagccagaagtaactcttggaataactccaggatatggaggaactcaaaggcttacaagattggttggaatggcaaaagcaaaagaattaatctttacaggtcaagttataaaagctgatgaagctgaaaaaatagggctagtaaatagagtcgttgagccagacattttaatagaagaagttgagaaattagctaagataatagctaaaaatgctcagcttgcagttagatactctaaagaagcaatacaacttggtgctcaaactgatataaatactggaatagatatagaatctaatttatttggtctttgtttttcaactaaagaccaaaaagaaggaatgtcagctttcgttgaaaagagagaagctaactttataaaagggtaataagaaggagatatacatatgagtcaggcgctaaaaaatttactgacattgttaaatctggaaaaaattgaggaaggactctttcgcggccagagtgaagatttaggtttacgccaggtgtttggcggccaggtcgtgggtcaggccttgtatgctgcaaaagagaccgtccctgaagagcggctggtacattcgtttcacagctactttcttcgccctggcgatagtaagaagccgattatttatgatgtcgaaacgctgcgtgacggtaacagcttcagcgcccgccgggttgctgctattcaaaacggcaaaccgattttttatatgactgcctctttccaggcaccagaagcgggtttcgaacatcaaaaaacaatgccgtccgcgccagcgcctgatggcctcccttcggaaacgcaaatcgcccaatcgctggcgcacctgctgccgccagtgctgaaagataaattcatctgcgatcgtccgctggaagtccgtccggtggagtttcataacccactgaaaggtcacgtcgcagaaccacatcgtcaggtgtggatccgcgcaaatggtagcgtgccggatgacctgcgcgttcatcagtatctgctcggttacgcttctgatcttaacttcctgccggtagctctacagccgcacggcatcggttttctcgaaccggggattcagattgccaccattgaccattccatgtggttccatcgcccgtttaatttgaatgaatggctgctgtatagcgtggagagcacctcggcgtccagcgcacgtggctttgtgcgcggtgagttttatacccaagacggcgtactggttgcctcgaccgttcaggaaggggtgatgcgtaatcacaattaa

SEQ ID NO: 120 - DNA, 8012 bp, Artificial Sequence
  Synthetic
ctcgagttcattatccatcctccatcgccacgatagttcatggcgataggtagaatagcaatgaacgattatccctatcaagcattctgactgataattgctcacacgaattcattaaagaggagaaaggtaccatggatttaaattctaaaaaatatcagatgcttaaagagctatatgtaagcttcgctgaaaatgaagttaaacctttagcaacagaacttgatgaagaagaaagatttccttatgaaacagtggaaaaaatggcaaaagcaggaatgatgggtataccatatccaaaagaatatggtggagaaggtggagacactgtaggatatataatggcagttgaagaattgtctagagtttgtggtactacaggagttatattatcagctcatacatctcttggctcatggcctatatatcaatatggtaatgaagaacaaaaacaaaaattcttaagaccactagcaagtggagaaaaattaggagcatttggtcttactgagcctaatgctggtacagatgcgtctggccaacaaacaactgctgttttagacggggatgaatacatacttaatggctcaaaaatatttataacaaacgcaatagctggtgacatatatgtagtaatggcaatgactgataaatctaaggggaacaaaggaatatcagcatttatagttgaaaaaggaactcctgggtttagctttggagttaaagaaaagaaaatgggtataagaggttcagctacgagtgaattaatatttgaggattgcagaatacctaaagaaaatttacttggaaaagaaggtcaaggatttaagatagcaatgtctactcttgatggtggtagaattggtatagctgcacaagctttaggtttagcacaaggtgctcttgatgaaactgttaaatatgtaaaagaaagagtacaatttggtagaccattatcaaaattccaaaatacacaattccaattagctgatatggaagttaaggtacaagcggctagacaccttgtatatcaagcagctataaataaagacttaggaaaaccttatggagtagaagcagcaatggcaaaattatttgcagctgaaacagctatggaagttactacaaaagctgtacaacttcatggaggatatggatacactcgtgactatccagtagaaagaatgatgagagatgctaagataactgaaatatatgaaggaactagtgaagttcaaagaatggttatttcaggaaaactattaaaatagtaagaaggagatatacatatggaggaaggatttatgaatatagtcgtttgtataaaacaagttccagatacaacagaagttaaactagatcctaatacaggtactttaattagagatggagtaccaagtataataaaccctgatgataaagcaggtttagaagaagctataaaattaaaagaagaaatgggtgctcatgtaactgttataacaatgggacctcctcaagcagatatggctttaaaagaagctttagcaatgggtgcagatagaggtatattattaacagatagagcatttgcgggtgctgatacttgggcaacttcatcagcattagcaggagcattaaaaaatatagattttgatattataatagctggaagacaggcgatagatggagatactgcacaagttggacctcaaatagctgaacatttaaatcttccatcaataacatatgctgaagaaataaaaactgaaggtgaatatgtattagtaaaaagacaatttgaagattgttgccatgacttaaaagttaaaatgccatgccttataacaactcttaaagatatgaacacaccaagatacatgaaagttggaagaatatatgatgctttcgaaaatgatgtagtagaaacatggactgtaaaagatatagaagttgacccttctaatttaggtcttaaaggttctccaactagtgtatttaaatcatttacaaaatcagttaaaccagctggtacaatatacaatgaagatgcgaaaacatcagctggaattatcatagataaattaaaagagaagtatatcatataataagaaggagatatacatatgggtaacgttttagtagtaatagaacaaagagaaaatgtaattcaaactgtttctttagaattactaggaaaggctacagaaatagcaaaagattatgatacaaaagtttctgcattacttttaggtagtaaggtagaaggtttaatagatacattagcacactatggtgcagatgaggtaatagtagtagatgatgaagctttagcagtgtatacaactgaaccatatacaaaagcagcttatgaagcaataaaagcagctgaccctatagttgtattatttggtgcaacttcaataggtagagatttagcgcctagagtttctgctagaatacatacaggtcttactgctgactgtacaggtcttgcagtagctgaagatacaaaattattattaatgacaagacctgcctttggtggaaatataatggcaacaatagtttgtaaagatttcagacctcaaatgtctacagttagaccaggggttatgaagaaaaatgaacctgatgaaactaaagaagctgtaattaaccgtttcaaggtagaatttaatgatgctgataaattagttcaagttgtacaagtaataaaagaagctaaaaaacaagttaaaatagaagatgctaagatattagtttctgctggacgtggaatgggtggaaaagaaaacttagacatactttatgaattagctgaaattataggtggagaagtttctggttctcgtgccactatagatgcaggttggttagataaagcaagacaagttggtcaaactggtaaaactgtaagaccagacctttatatagcatgtggtatatctggagcaatacaacatatagctggtatggaagatgctgagtttatagttgctataaataaaaatccagaagctccaatatttaaatatgctgatgttggtatagttggagatgttcataaagtgcttccagaacttatcagtcagttaagtgttgcaaaagaaaaaggtgaagttttagctaactaataagaaggagatatacatatgagagaagtagtaattgccagtgcagctagaacagcagtaggaagttttggaggagcatttaaatcagtttcagcggtagagttaggggtaacagcagctaaagaagctataaaaagagctaacataactccagatatgatagatgaatctcttttagggggagtacttacagcaggtcttggacaaaatatagcaagacaaatagcattaggagcaggaataccagtagaaaaaccagctatgactataaatatagtttgtggttctggattaagatctgtttcaatggcatctcaacttatagcattaggtgatgctgatataatgttagttggtggagctgaaaacatgagtatgtctccttatttagtaccaagtgcgagatatggtgcaagaatgggtgatgctgcttttgttgattcaatgataaaagatggattatcagacatatttaataactatcacatgggtattactgctgaaaacatagcagagcaatggaatataactagagaagaacaagatgaattagctcttgcaagtcaaaataaagctgaaaaagctcaagctgaaggaaaatttgatgaagaaatagttcctgttgttataaaaggaagaaaaggtgacactgtagtagataaagatgaatatattaagcctggcactacaatggagaaacttgctaagttaagacctgcatttaaaaaagatggaacagttactgctggtaatgcatcaggaataaatgatggtgctgctatgttagtagtaatggctaaagaaaaagctgaagaactaggaatagagcctcttgcaactatagtttcttatggaacagctggtgttgaccctaaaataatgggatatggaccagttccagcaactaaaaaagctttagaagctgctaatatgactattgaagatatagatttagttgaagctaatgaggcatttgctgcccaatctgtagctgtaataagagacttaaatatagatatgaataaagttaatgttaatggtggagcaatagctataggacatccaataggatgctcaggagcaagaatacttactacacttttatatgaaatgaagagaagagatgctaaaactggtcttgctacactttgtataggcggtggaatgggaactactttaatagttaagagatagtaagaaggagatatacatatgaaattagctgtaataggtagtggaactatgggaagtggtattgtacaaacttttgcaagttgtggacatgatgtatgtttaaagagtagaactcaaggtgctatagataaatgtttagctttattagataaaaatttaactaagttagttactaagggaaaaatggatgaagctacaaaagcagaaatattaagtcatgttagttcaactactaattatgaagatttaaaagatatggatttaataatagaagcatctgtagaagacatgaatataaagaaagatgttttcaagttactagatgaattatgtaaagaagatactatcttggcaacaaatacttcatcattatctataacagaaatagcttcttctactaagcgcccagataaagttataggaatgcatttctttaatccagttcctatgatgaaattagttgaagttataagtggtcagttaacatcaaaagttacttttgatacagtatttgaattatctaagagtatcaataaagtaccagtagatgtatctgaatctcctggatttgtagtaaatagaatacttatacctatgataaatgaagctgttggtatatatgcagatggtgttgcaagtaaagaagaaatagatgaagctatgaaattaggagcaaaccatccaatgggaccactagcattaggtgatttaatcggattagatgttgttttagctataatgaacgttttatatactgaatttggagatactaaatatagacctcatccacttttagctaaaatggttagagctaatcaattaggaagaaaaactaagataggattctatgattataataaataataagaaggagatatacatatgagtacaagtgatgttaaagtttatgagaatgtagctgttgaagtagatggaaatatatgtacagtgaaaatgaatagacctaaagcccttaatgcaataaattcaaagactttagaagaactttatgaagtatttgtagatattaataatgatgaaactattgatgttgtaatattgacaggggaaggaaaggcatttgtagctggagcagatattgcatacatgaaagatttagatgctgtagctgctaaagattttagtatcttaggagcaaaagcttttggagaaatagaaaatagtaaaaaagtagtgatagctgctgtaaacggatttgctttaggtggaggatgtgaacttgcaatggcatgtgatataagaattgcatctgctaaagctaaatttggtcagccagaagtaactcttggaataactccaggatatggaggaactcaaaggcttacaagattggttggaatggcaaaagcaaaagaattaatctttacaggtcaagttataaaagctgatgaagctgaaaaaatagggctagtaaatagagtcgttgagccagacattttaatagaagaagttgagaaattagctaagataatagctaaaaatgctcagcttgcagttagatactctaaagaagcaatacaacttggtgctcaaactgatataaatactggaatagatatagaatctaatttatttggtctttgtttttcaactaaagaccaaaaagaaggaatgtcagctttcgttgaaaagagagaagctaactttataaaagggtaataagaaggagatatacatatgagaagttttgaagaagtaattaagtttgcaaaagaaagaggacctaaaactatatcagtagcatgttgccaagataaagaagttttaatggcagttgaaatggctagaaaagaaaaaatagcaaatgccattttagtaggagatatagaaaagactaaagaaattgcaaaaagcatagacatggatatcgaaaattatgaactgatagatataaaagatttagcagaagcatctctaaaatctgttgaattagtttcacaaggaaaagccgacatggtaatgaaaggcttagtagacacatcaataatactaaaagcagttttaaataaagaagtaggtcttagaactggaaatgtattaagtcacgtagcagtatttgatgtagagggatatgatagattatttttcgtaactgacgcagctatgaacttagctcctgatacaaatactaaaaagcaaatcatagaaaatgcttgcacagtagcacattcattagatataagtgaaccaaaagttgctgcaatatgcgcaaaagaaaaagtaaatccaaaaatgaaagatacagttgaagctaaagaactagaagaaatgtatgaaagaggagaaatcaaaggttgtatggttggtgggccttttgcaattgataatgcagtatctttagaagcagctaaacataaaggtataaatcatcctgtagcaggacgagctgatatattattagccccagatattgaaggtggtaacatattatataaagctttggtattcttctcaaaatcaaaaaatgcaggagttatagttggggctaaagcaccaataatattaacttctagagcagacagtgaagaaactaaactaaactcaatagctttaggtgttttaatggcagcaaaggcataataagaaggagatatacatatgagcaaaatatttaaaatcttaacaataaatcctggttcgacatcaactaaaatagctgtatttgataatgaggatttagtatttgaaaaaactttaagacattcttcagaagaaataggaaaatatgagaaggtgtctgaccaatttgaatttcgtaaacaagtaatagaagaagctctaaaagaaggtggagtaaaaacatctgaattagatgctgtagtaggtagaggaggacttcttaaacctataaaaggtggtacttattcagtaagtgctgctatgattgaagatttaaaagtgggagttttaggagaacacgcttcaaacctaggtggaataatagcaaaacaaataggtgaagaagtaaatgttccttcatacatagtagaccctgttgttgtagatgaattagaagatgttgctagaatttctggtatgcctgaaataagtagagcaagtgtagtacatgctttaaatcaaaaggcaatagcaagaagatatgctagagaaataaacaagaaatatgaagatataaatcttatagttgcacacatgggtggaggagtttctgttggagctcataaaaatggtaaaatagtagatgttgcaaacgcattagatggagaaggacctttctctccagaaagaagtggtggactaccagtaggtgcattagtaaaaatgtgctttagtggaaaatatactcaagatgaaattaaaaagaaaataaaaggtaatggcggactagttgcatacttaaacactaatgatgctagagaagttgaagaaagaattgaagctggtgatgaaaaagctaaattagtatatgaagctatggcatatcaaatctctaaagaaataggagctagtgctgcagttcttaagggagatgtaaaagcaatattattaactggtggaatcgcatattcaaaaatgtttacagaaatgattgcagatagagttaaatttatagcagatgtaaaagtttatccaggtgaagatgaaatgattgcattagctcaaggtggacttagagttttaactggtgaagaagaggctcaagtttatgataactaataa

SEQ ID NO: 121 - DNA, 6224 bp, Artificial Sequence
  Synthetic
ctcgagttcattatccatcctccatcgccacgatagttcatggcgataggtagaatagcaatgaacgattatccctatcaagcattctgactgataattgctcacacgaattcattaaagaggagaaaggtaccatgatcgtaaaacctatggtacgcaacaatatctgcctgaacgcccatcctcagggctgcaagaagggagtggaagatcagattgaatataccaagaaacgcattaccgcagaagtcaaagctggcgcaaaagctccaaaaaacgttctggtgcttggctgctcaaatggttacggcctggcgagccgcattactgctgcgttcggatacggggctgcgaccatcggcgtgtcctttgaaaaagcgggttcagaaaccaaatatggtacaccgggatggtacaataatttggcatttgatgaagcggcaaaacgcgagggtctttatagcgtgacgatcgacggcgatgcgttttcagacgagatcaaggcccaggtaattgaggaagccaaaaaaaaaggtatcaaatttgatctgatcgtatacagcttggccagcccagtacgtactgatcctgatacaggtatcatgcacaaaagcgttttgaaaccctttggaaaaacgttcacaggcaaaacagtagatccgtttactggcgagctgaaggaaatctccgcggaaccagcaaatgacgaggaagcagccgccactgttaaagttatggggggtgaagattgggaacgttggattaagcagctgtcgaaggaaggcctcttagaagaaggctgtattaccttggcctatagttatattggccctgaagctacccaagctttgtaccgtaaaggcacaatcggcaaggccaaagaacacctggaggccacagcacaccgtctcaacaaagagaacccgtcaatccgtgccttcgtgagcgtgaataaaggcctggtaacccgcgcaagcgccgtaatcccggtaatccctctgtatctcgccagcttgttcaaagtaatgaaagagaagggcaatcatgaaggttgtattgaacagatcacgcgtctgtacgccgagcgcctgtaccgtaaagatggtacaattccagttgatgaggaaaatcgcattcgcattgatgattgggagttagaagaagacgtccagaaagcggtatccgcgttgatggagaaagtcacgggtgaaaacgcagaatctctcactgacttagcggggtaccgccatgatttcttagctagtaacggctttgatgtagaaggtattaattatgaagcggaagttgaacgcttcgaccgtatctgataagaaggagatatacatatgagagaagtagtaattgccagtgcagctagaacagcagtaggaagttttggaggagcatttaaatcagtttcagcggtagagttaggggtaacagcagctaaagaagctataaaaagagctaacataactccagatatgatagatgaatctcttttagggggagtacttacagcaggtcttggacaaaatatagcaagacaaatagcattaggagcaggaataccagtagaaaaaccagctatgactataaatatagtttgtggttctggattaagatctgtttcaatggcatctcaacttatagcattaggtgatgctgatataatgttagttggtggagctgaaaacatgagtatgtctccttatttagtaccaagtgcgagatatggtgcaagaatgggtgatgctgcttttgttgattcaatgataaaagatggattatcagacatatttaataactatcacatgggtattactgctgaaaacatagcagagcaatggaatataactagagaagaacaagatgaattagctcttgcaagtcaaaataaagctgaaaaagctcaagctgaaggaaaatttgatgaagaaatagttcctgttgttataaaaggaagaaaaggtgacactgtagtagataaagatgaatatattaagcctggcactacaatggagaaacttgctaagttaagacctgcatttaaaaaagatggaacagttactgctggtaatgcatcaggaataaatgatggtgctgctatgttagtagtaatggctaaagaaaaagctgaagaactaggaatagagcctcttgcaactatagtttcttatggaacagctggtgttgaccctaaaataatgggatatggaccagttccagcaactaaaaaagctttagaagctgctaatatgactattgaagatatagatttagttgaagctaatgaggcatttgctgcccaatctgtagctgtaataagagacttaaatatagatatgaataaagttaatgttaatggtggagcaatagctataggacatccaataggatgctcaggagcaagaatacttactacacttttatatgaaatgaagagaagagatgctaaaactggtcttgctacactttgtataggcggtggaatgggaactactttaatagttaagagatagtaagaaggagatatacatatgaaattagctgtaataggtagtggaactatgggaagtggtattgtacaaacttttgcaagttgtggacatgatgtatgtttaaagagtagaactcaaggtgctatagataaatgtttagctttattagataaaaatttaactaagttagttactaagggaaaaatggatgaagctacaaaagcagaaatattaagtcatgttagttcaactactaattatgaagatttaaaagatatggatttaataatagaagcatctgtagaagacatgaatataaagaaagatgttttcaagttactagatgaattatgtaaagaagatactatcttggcaacaaatacttcatcattatctataacagaaatagcttcttctactaagcgcccagataaagttataggaatgcatttctttaatccagttcctatgatgaaattagttgaagttataagtggtcagttaacatcaaaagttacttttgatacagtatttgaattatctaagagtatcaataaagtaccagtagatgtatctgaatctcctggatttgtagtaaatagaatacttatacctatgataaatgaagctgttggtatatatgcagatggtgttgcaagtaaagaagaaatagatgaagctatgaaattaggagcaaaccatccaatgggaccactagcattaggtgatttaatcggattagatgttgttttagctataatgaacgttttatatactgaatttggagatactaaatatagacctcatccacttttagctaaaatggttagagctaatcaattaggaagaaaaactaagataggattctatgattataataaataataagaaggagatatacatatgagtacaagtgatgttaaagtttatgagaatgtagctgttgaagtagatggaaatatatgtacagtgaaaatgaatagacctaaagcccttaatgcaataaattcaaagactttagaagaactttatgaagtatttgtagatattaataatgatgaaactattgatgttgtaatattgacaggggaaggaaaggcatttgtagctggagcagatattgcatacatgaaagatttagatgctgtagctgctaaagattttagtatcttaggagcaaaagcttttggagaaatagaaaatagtaaaaaagtagtgatagctgctgtaaacggatttgctttaggtggaggatgtgaacttgcaatggcatgtgatataagaattgcatctgctaaagctaaatttggtcagccagaagtaactcttggaataactccaggatatggaggaactcaaaggcttacaagattggttggaatggcaaaagcaaaagaattaatctttacaggtcaagttataaaagctgatgaagctgaaaaaatagggctagtaaatagagtcgttgagccagacattttaatagaagaagttgagaaattagctaagataatagctaaaaatgctcagcttgcagttagatactctaaagaagcaatacaacttggtgctcaaactgatataaatactggaatagatatagaatctaatttatttggtctttgtttttcaactaaagaccaaaaagaaggaatgtcagctttcgttgaaaagagagaagctaactttataaaagggtaataagaaggagatatacatatgagaagttttgaagaagtaattaagtttgcaaaagaaagaggacctaaaactatatcagtagcatgttgccaagataaagaagttttaatggcagttgaaatggctagaaaagaaaaaatagcaaatgccattttagtaggagatatagaaaagactaaagaaattgcaaaaagcatagacatggatatcgaaaattatgaactgatagatataaaagatttagcagaagcatctctaaaatctgttgaattagtttcacaaggaaaagccgacatggtaatgaaaggcttagtagacacatcaataatactaaaagcagttttaaataaagaagtaggtcttagaactggaaatgtattaagtcacgtagcagtatttgatgtagagggatatgatagattatttttcgtaactgacgcagctatgaacttagctcctgatacaaatactaaaaagcaaatcatagaaaatgcttgcacagtagcacattcattagatataagtgaaccaaaagttgctgcaatatgcgcaaaagaaaaagtaaatccaaaaatgaaagatacagttgaagctaaagaactagaagaaatgtatgaaagaggagaaatcaaaggttgtatggttggtgggccttttgcaattgataatgcagtatctttagaagcagctaaacataaaggtataaatcatcctgtagcaggacgagctgatatattattagccccagatattgaaggtggtaacatattatataaagctttggtattcttctcaaaatcaaaaaatgcaggagttatagttggggctaaagcaccaataatattaacttctagagcagacagtgaagaaactaaactaaactcaatagctttaggtgttttaatggcagcaaaggcataataagaaggagatatacatatgagcaaaatatttaaaatcttaacaataaatcctggttcgacatcaactaaaatagctgtatttgataatgaggatttagtatttgaaaaaactttaagacattcttcagaagaaataggaaaatatgagaaggtgtctgaccaatttgaatttcgtaaacaagtaatagaagaagctctaaaagaaggtggagtaaaaacatctgaattagatgctgtagtaggtagaggaggacttcttaaacctataaaaggtggtacttattcagtaagtgctgctatgattgaagatttaaaagtgggagttttaggagaacacgcttcaaacctaggtggaataatagcaaaacaaataggtgaagaagtaaatgttccttcatacatagtagaccctgttgttgtagatgaattagaagatgttgctagaatttctggtatgcctgaaataagtagagcaagtgtagtacatgctttaaatcaaaaggcaatagcaagaagatatgctagagaaataaacaagaaatatgaagatataaatcttatagttgcacacatgggtggaggagtttctgttggagctcataaaaatggtaaaatagtagatgttgcaaacgcattagatggagaaggacctttctctccagaaagaagtggtggactaccagtaggtgcattagtaaaaatgtgctttagtggaaaatatactcaagatgaaattaaaaagaaaataaaaggtaatggcggactagttgcatacttaaacactaatgatgctagagaagttgaagaaagaattgaagctggtgatgaaaaagctaaattagtatatgaagctatggcatatcaaatctctaaagaaataggagctagtgctgcagttcttaagggagatgtaaaagcaatattattaactggtggaatcgcatattcaaaaatgtttacagaaatgattgcagatagagttaaatttatagcagatgtaaaagtttatccaggtgaagatgaaatgattgcattagctcaaggtggacttagagttttaactggtgaagaagaggctcaagtttatgataactaataa

SEQ ID NO: 122 - DNA, 3118 bp, Artificial Sequence
  Synthetic
ctcgagatgctagcaattgtgagcggataacaattgacattgtgagcggataacaagatactgagcacatcagcaggacgcactgaccttaattaaaagaattcattaaagaggagaaaggtaccatgaatattcgtgatcttgagtacctggtggcattggctgaacaccgccattttcggcgtgcggcagattcctgccacgttagccagccgacgcttagcgggcaaattcgtaagctggaagatgagctgggcgtgatgttgctggagcggaccagccgtaaagtgttgttcacccaggcgggaatgctgctggtggatcaggcgcgtaccgtgctgcgtgaggtgaaagtccttaaagagatggcaagccagcagggcgagacgatgtccggaccgctgcacattggtttgattcccacagttggaccgtacctgctaccgcatattatccctatgctgcaccagacctttccaaagctggaaatgtatctgcatgaagcacagacccaccagttactggcgcaactggacagcggcaaactcgattgcgtgatcctcgcgctggtgaaagagagcgaagcattcattgaagtgccgttgtttgatgagccaatgttgctggctatctatgaagatcacccgtgggcgaaccgcgaatgcgtaccgatggccgatctggcaggggaaaaactgctgatgctggaagatggtcactgtttgcgcgatcaggcaatgggtttctgttttgaagccggggcggatgaagatacacacttccgcgcgaccagcctggaaactctgcgcaacatggtggcggcaggtagcgggatcactttactgccagcgctggctgtgccgccggagcgcaaacgcgatggggttgtttatctgccgtgcattaagccggaaccacgccgcactattggcctggtttatcgtcctggctcaccgctgcgcagccgctatgagcagctggcagaggccatccgcgcaagaatggatggccatttcgataaagttttaaaacaggcggtttaaggatcccatggtacgcgtgctagaggcatcaaataaaacgaaaggctcagtcgaaagactgggcctttcgttttatctgttgtttgtcggtgaacgctctcctgagtaggacaaatccgccgccctagacctaggggatatattccgcttcctcgctcactgactcgctacgctcggtcgttcgactgcggcgagcggaaatggcttacgaacggggcggagatttcctggaagatgccaggaagatacttaacagggaagtgagagggccgcggcaaagccgtttttccataggctccgcccccctgacaagcatcacgaaatctgacgctcaaatcagtggtggcgaaacccgacaggactataaagataccaggcgtttccccctggcggctccctcgtgcgctctcctgttcctgcctttcggtttaccggtgtcattccgctgttatggccgcgtttgtctcattccacgcctgacactcagttccgggtaggcagttcgctccaagctggactgtatgcacgaaccccccgttcagtccgaccgctgcgccttatccggtaactatcgtcttgagtccaacccggaaagacatgcaaaagcaccactggcagcagccactggtaattgatttagaggagttagtcttgaagtcatgcgccggttaaggctaaactgaaaggacaagttttggtgactgcgctcctccaagccagttacctcggttcaaagagttggtagctcagagaaccttcgaaaaaccgccctgcaaggcggttttttcgttttcagagcaagagattacgcgcagaccaaaacgatctcaagaagatcatcttattaatcagataaaatatttctagatttcagtgcaatttatctcttcaaatgtagcacctgaagtcagccccatacgatataagttgttactagtgcttggattctcaccaataaaaaacgcccggcggcaaccgagcgttctgaacaaatccagatggagttctgaggtcattactggatctatcaacaggagtccaagcgagctctcgaaccccagagtcccgctcagaagaactcgtcaagaaggcgatagaaggcgatgcgctgcgaatcgggagcggcgataccgtaaagcacgaggaagcggtcagcccattcgccgccaagctcttcagcaatatcacgggtagccaacgctatgtcctgatagcggtccgccacacccagccggccacagtcgatgaatccagaaaagcggccattttccaccatgatattcggcaagcaggcatcgccatgggtcacgacgagatcctcgccgtcgggcatgcgcgccttgagcctggcgaacagttcggctggcgcgagcccctgatgctcttcgtccagatcatcctgatcgacaagaccggcttccatccgagtacgtgctcgctcgatgcgatgtttcgcttggtggtcgaatgggcaggtagccggatcaagcgtatgcagccgccgcattgcatcagccatgatggatactttctcggcaggagcaaggtgagatgacaggagatcctgccccggcacttcgcccaatagcagccagtcccttcccgcttcagtgacaacgtcgagcacagctgcgcaaggaacgcccgtcgtggccagccacgatagccgcgctgcctcgtcctgcagttcattcagggcaccggacaggtcggtcttgacaaaaagaaccgggcgcccctgcgctgacagccggaacacggcggcatcagagcagccgattgtctgttgtgcccagtcatagccgaatagcctctccacccaagcggccggagaacctgcgtgcaatccatcttgttcaatcatgcgaaacgatcctcatcctgtctcttgatcagatcttgatcccctgcgccatcagatccttggcggcaagaaagccatccagtttactttgcagggcttcccaaccttaccagagggcgccccagctggcaattccgacgtctaagaaaccattattatcatgacattaacctataaaaataggcgtatcacgaggccctttcgtcttcac

SEQ ID NO: 123 - DNA, 5081 bp, Artificial Sequence
  Synthetic
ctcgagttcattatccatcctccatcgccacgatagttcatggcgataggtagaatagcaatgaacgattatccctatcaagcattctgactgataattgctcacacgaattcattaaagaggagaaaggtaccatgatcgtaaaacctatggtacgcaacaatatctgcctgaacgcccatcctcagggctgcaagaagggagtggaagatcagattgaatataccaagaaacgcattaccgcagaagtcaaagctggcgcaaaagctccaaaaaacgttctggtgcttggctgctcaaatggttacggcctggcgagccgcattactgctgcgttcggatacggggctgcgaccatcggcgtgtcctttgaaaaagcgggttcagaaaccaaatatggtacaccgggatggtacaataatttggcatttgatgaagcggcaaaacgcgagggtctttatagcgtgacgatcgacggcgatgcgttttcagacgagatcaaggcccaggtaattgaggaagccaaaaaaaaaggtatcaaatttgatctgatcgtatacagcttggccagcccagtacgtactgatcctgatacaggtatcatgcacaaaagcgttttgaaaccctttggaaaaacgttcacaggcaaaacagtagatccgtttactggcgagctgaaggaaatctccgcggaaccagcaaatgacgaggaagcagccgccactgttaaagttatggggggtgaagattgggaacgttggattaagcagctgtcgaaggaaggcctcttagaagaaggctgtattaccttggcctatagttatattggccctgaagctacccaagctttgtaccgtaaaggcacaatcggcaaggccaaagaacacctggaggccacagcacaccgtctcaacaaagagaacccgtcaatccgtgccttcgtgagcgtgaataaaggcctggtaacccgcgcaagcgccgtaatcccggtaatccctctgtatctcgccagcttgttcaaagtaatgaaagagaagggcaatcatgaaggttgtattgaacagatcacgcgtctgtacgccgagcgcctgtaccgtaaagatggtacaattccagttgatgaggaaaatcgcattcgcattgatgattgggagttagaagaagacgtccagaaagcggtatccgcgttgatggagaaagtcacgggtgaaaacgcagaatctctcactgacttagcggggtaccgccatgatttcttagctagtaacggctttgatgtagaaggtattaattatgaagcggaagttgaacgcttcgaccgtatctgataagaaggagatatacatatgagagaagtagtaattgccagtgcagctagaacagcagtaggaagttttggaggagcatttaaatcagtttcagcggtagagttaggggtaacagcagctaaagaagctataaaaagagctaacataactccagatatgatagatgaatctcttttagggggagtacttacagcaggtcttggacaaaatatagcaagacaaatagcattaggagcaggaataccagtagaaaaaccagctatgactataaatatagtttgtggttctggattaagatctgtttcaatggcatctcaacttatagcattaggtgatgctgatataatgttagttggtggagctgaaaacatgagtatgtctccttatttagtaccaagtgcgagatatggtgcaagaatgggtgatgctgcttttgttgattcaatgataaaagatggattatcagacatatttaataactatcacatgggtattactgctgaaaacatagcagagcaatggaatataactagagaagaacaagatgaattagctcttgcaagtcaaaataaagctgaaaaagctcaagctgaaggaaaatttgatgaagaaatagttcctgttgttataaaaggaagaaaaggtgacactgtagtagataaagatgaatatattaagcctggcactacaatggagaaacttgctaagttaagacctgcatttaaaaaagatggaacagttactgctggtaatgcatcaggaataaatgatggtgctgctatgttagtagtaatggctaaagaaaaagctgaagaactaggaatagagcctcttgcaactatagtttcttatggaacagctggtgttgaccctaaaataatgggatatggaccagttccagcaactaaaaaagctttagaagctgctaatatgactattgaagatatagatttagttgaagctaatgaggcatttgctgcccaatctgtagctgtaataagagacttaaatatagatatgaataaagttaatgttaatggtggagcaatagctataggacatccaataggatgctcaggagcaagaatacttactacacttttatatgaaatgaagagaagagatgctaaaactggtcttgctacactttgtataggcggtggaatgggaactactttaatagttaagagatagtaagaaggagatatacatatgaaattagctgtaataggtagtggaactatgggaagtggtattgtacaaacttttgcaagttgtggacatgatgtatgtttaaagagtagaactcaaggtgctatagataaatgtttagctttattagataaaaatttaactaagttagttactaagggaaaaatggatgaagctacaaaagcagaaatattaagtcatgttagttcaactactaattatgaagatttaaaagatatggatttaataatagaagcatctgtagaagacatgaatataaagaaagatgttttcaagttactagatgaattatgtaaagaagatactatcttggcaacaaatacttcatcattatctataacagaaatagcttcttctactaagcgcccagataaagttataggaatgcatttctttaatccagttcctatgatgaaattagttgaagttataagtggtcagttaacatcaaaagttacttttgatacagtatttgaattatctaagagtatcaataaagtaccagtagatgtatctgaatctcctggatttgtagtaaatagaatacttatacctatgataaatgaagctgttggtatatatgcagatggtgttgcaagtaaagaagaaatagatgaagctatgaaattaggagcaaaccatccaatgggaccactagcattaggtgatttaatcggattagatgttgttttagctataatgaacgttttatatactgaatttggagatactaaatatagacctcatccacttttagctaaaatggttagagctaatcaattaggaagaaaaactaagataggattctatgattataataaataataagaaggagatatacatatgagtacaagtgatgttaaagtttatgagaatgtagctgttgaagtagatggaaatatatgtacagtgaaaatgaatagacctaaagcccttaatgcaataaattcaaagactttagaagaactttatgaagtatttgtagatattaataatgatgaaactattgatgttgtaatattgacaggggaaggaaaggcatttgtagctggagcagatattgcatacatgaaagatttagatgctgtagctgctaaagattttagtatcttaggagcaaaagcttttggagaaatagaaaatagtaaaaaagtagtgatagctgctgtaaacggatttgctttaggtggaggatgtgaacttgcaatggcatgtgatataagaattgcatctgctaaagctaaatttggtcagccagaagtaactcttggaataactccaggatatggaggaactcaaaggcttacaagattggttggaatggcaaaagcaaaagaattaatctttacaggtcaagttataaaagctgatgaagctgaaaaaatagggctagtaaatagagtcgttgagccagacattttaatagaagaagttgagaaattagctaagataatagctaaaaatgctcagcttgcagttagatactctaaagaagcaatacaacttggtgctcaaactgatataaatactggaatagatatagaatctaatttatttggtctttgtttttcaactaaagaccaaaaagaaggaatgtcagctttcgttgaaaagagagaagctaactttataaaagggtaataagaaggagatatacatatgagtcaggcgctaaaaaatttactgacattgttaaatctggaaaaaattgaggaaggactctttcgcggccagagtgaagatttaggtttacgccaggtgtttggcggccaggtcgtgggtcaggccttgtatgctgcaaaagagaccgtccctgaagagcggctggtacattcgtttcacagctactttcttcgccctggcgatagtaagaagccgattatttatgatgtcgaaacgctgcgtgacggtaacagcttcagcgcccgccgggttgctgctattcaaaacggcaaaccgattttttatatgactgcctctttccaggcaccagaagcgggtttcgaacatcaaaaaacaatgccgtccgcgccagcgcctgatggcctcccttcggaaacgcaaatcgcccaatcgctggcgcacctgctgccgccagtgctgaaagataaattcatctgcgatcgtccgctggaagtccgtccggtggagtttcataacccactgaaaggtcacgtcgcagaaccacatcgtcaggtgtggatccgcgcaaatggtagcgtgccggatgacctgcgcgttcatcagtatctgctcggttacgcttctgatcttaacttcctgccggtagctctacagccgcacggcatcggttttctcgaaccggggattcagattgccaccattgaccattccatgtggttccatcgcccgtttaatttgaatgaatggctgctgtatagcgtggagagcacctcggcgtccagcgcacgtggctttgtgcgcggtgagttttatacccaagacggcgtactggttgcctcgaccgttcaggaaggggtgatgcgtaatcacaattaa

SEQ ID NO: 124 - DNA, 8650 bp, Artificial Sequence
  Synthetic
gtaaaacgacggccagtgaattcgttaagacccactttcacatttaagttgtttttctaatccgcatatgatcaattcaaggccgaataagaaggctggctctgcaccttggtgatcaaataattcgatagcttgtcgtaataatggcggcatactatcagtagtaggtgtttccctttcttctttagcgacttgatgctcttgatcttccaatacgcaacctaaagtaaaatgccccacagcgctgagtgcatataatgcattctctagtgaaaaaccttgttggcataaaaaggctaattgattttcgagagtttcatactgtttttctgtaggccgtgtacctaaatgtacttttgctccatcgcgatgacttagtaaagcacatctaaaacttttagcgttattacgtaaaaaatcttgccagctttccccttctaaagggcaaaagtgagtatggtgcctatctaacatctcaatggctaaggcgtcgagcaaagcccgcttattttttacatgccaatacaatgtaggctgctctacacctagcttctgggcgagtttacgggttgttaaaccttcgattccgacctcattaagcagctctaatgcgctgttaatcactttacttttatctaatctagacatcattaattcctaatttttgttgacactctatcattgatagagttattttaccactccctatcagtgatagagaaaagtgaactctagaaataattttgtttaactttaagaaggagatatacatatggatttaaattctaaaaaatatcagatgcttaaagagctatatgtaagcttcgctgaaaatgaagttaaacctttagcaacagaacttgatgaagaagaaagatttccttatgaaacagtggaaaaaatggcaaaagcaggaatgatgggtataccatatccaaaagaatatggtggagaaggtggagacactgtaggatatataatggcagttgaagaattgtctagagtttgtggtactacaggagttatattatcagctcatacatctcttggctcatggcctatatatcaatatggtaatgaagaacaaaaacaaaaattcttaagaccactagcaagtggagaaaaattaggagcatttggtcttactgagcctaatgctggtacagatgcgtctggccaacaaacaactgctgttttagacggggatgaatacatacttaatggctcaaaaatatttataacaaacgcaatagctggtgacatatatgtagtaatggcaatgactgataaatctaaggggaacaaaggaatatcagcatttatagttgaaaaaggaactcctgggtttagctttggagttaaagaaaagaaaatgggtataagaggttcagctacgagtgaattaatatttgaggattgcagaatacctaaagaaaatttacttggaaaagaaggtcaaggatttaagatagcaatgtctactcttgatggtggtagaattggtatagctgcacaagctttaggtttagcacaaggtgctcttgatgaaactgttaaatatgtaaaagaaagagtacaatttggtagaccattatcaaaattccaaaatacacaattccaattagctgatatggaagttaaggtacaagcggctagacaccttgtatatcaagcagctataaataaagacttaggaaaaccttatggagtagaagcagcaatggcaaaattatttgcagctgaaacagctatggaagttactacaaaagctgtacaacttcatggaggatatggatacactcgtgactatccagtagaaagaatgatgagagatgctaagataactgaaatatatgaaggaactagtgaagttcaaagaatggttatttcaggaaaactattaaaatagtaagaaggagatatacatatggaggaaggatttatgaatatagtcgtttgtataaaacaagttccagatacaacagaagttaaactagatcctaatacaggtactttaattagagatggagtaccaagtataataaaccctgatgataaagcaggtttagaagaagctataaaattaaaagaagaaatgggtgctcatgtaactgttataacaatgggacctcctcaagcagatatggctttaaaagaagctttagcaatgggtgcagatagaggtatattattaacagatagagcatttgcgggtgctgatacttgggcaacttcatcagcattagcaggagcattaaaaaatatagattttgatattataatagctggaagacaggcgatagatggagatactgcacaagttggacctcaaatagctgaacatttaaatcttccatcaataacatatgctgaagaaataaaaactgaaggtgaatatgtattagtaaaaagacaatttgaagattgttgccatgacttaaaagttaaaatgccatgccttataacaactcttaaagatatgaacacaccaagatacatgaaagttggaagaatatatgatgctttcgaaaatgatgtagtagaaacatggactgtaaaagatatagaagttgacccttctaatttaggtcttaaaggttctccaactagtgtatttaaatcatttacaaaatcagttaaaccagctggtacaatatacaatgaagatgcgaaaacatcagctggaattatcatagataaattaaaagagaagtatatcatataataagaaggagatatacatatgggtaacgttttagtagtaatagaacaaagagaaaatgtaattcaaactgtttctttagaattactaggaaaggctacagaaatagcaaaagattatgatacaaaagtttctgcattacttttaggtagtaaggtagaaggtttaatagatacattagcacactatggtgcagatgaggtaatagtagtagatgatgaagctttagcagtgtatacaactgaaccatatacaaaagcagcttatgaagcaataaaagcagctgaccctatagttgtattatttggtgcaacttcaataggtagagatttagcgcctagagtttctgctagaatacatacaggtcttactgctgactgtacaggtcttgcagtagctgaagatacaaaattattattaatgacaagacctgcctttggtggaaatataatggcaacaatagtttgtaaagatttcagacctcaaatgtctacagttagaccaggggttatgaagaaaaatgaacctgatgaaactaaagaagctgtaattaaccgtttcaaggtagaatttaatgatgctgataaattagttcaagttgtacaagtaataaaagaagctaaaaaacaagttaaaatagaagatgctaagatattagtttctgctggacgtggaatgggtggaaaagaaaacttagacatactttatgaattagctgaaattataggtggagaagtttctggttctcgtgccactatagatgcaggttggttagataaagcaagacaagttggtcaaactggtaaaactgtaagaccagacctttatatagcatgtggtatatctggagcaatacaacatatagctggtatggaagatgctgagtttatagttgctataaataaaaatccagaagctccaatatttaaatatgctgatgttggtatagttggagatgttcataaagtgcttccagaacttatcagtcagttaagtgttgcaaaagaaaaaggtgaagttttagctaactaataagaaggagatatacatatgagagaagtagtaattgccagtgcagctagaacagcagtaggaagttttggaggagcatttaaatcagtttcagcggtagagttaggggtaacagcagctaaagaagctataaaaagagctaacataactccagatatgatagatgaatctcttttagggggagtacttacagcaggtcttggacaaaatatagcaagacaaatagcattaggagcaggaataccagtagaaaaaccagctatgactataaatatagtttgtggttctggattaagatctgtttcaatggcatctcaacttatagcattaggtgatgctgatataatgttagttggtggagctgaaaacatgagtatgtctccttatttagtaccaagtgcgagatatggtgcaagaatgggtgatgctgcttttgttgattcaatgataaaagatggattatcagacatatttaataactatcacatgggtattactgctgaaaacatagcagagcaatggaatataactagagaagaacaagatgaattagctcttgcaagtcaaaataaagctgaaaaagctcaagctgaaggaaaatttgatgaagaaatagttcctgttgttataaaaggaagaaaaggtgacactgtagtagataaagatgaatatattaagcctggcactacaatggagaaacttgctaagttaagacctgcatttaaaaaagatggaacagttactgctggtaatgcatcaggaataaatgatggtgctgctatgttagtagtaatggctaaagaaaaagctgaagaactaggaatagagcctcttgcaactatagtttcttatggaacagctggtgttgaccctaaaataatgggatatggaccagttccagcaactaaaaaagctttagaagctgctaatatgactattgaagatatagatttagttgaagctaatgaggcatttgctgcccaatctgtagctgtaataagagacttaaatatagatatgaataaagttaatgttaatggtggagcaatagctataggacatccaataggatgctcaggagcaagaatacttactacacttttatatgaaatgaagagaagagatgctaaaactggtcttgctacactttgtataggcggtggaatgggaactactttaatagttaagagatagtaagaaggagatatacatatgaaattagctgtaataggtagtggaactatgggaagtggtattgtacaaacttttgcaagttgtggacatgatgtatgtttaaagagtagaactcaaggtgctatagataaatgtttagctttattagataaaaatttaactaagttagttactaagggaaaaatggatgaagctacaaaagcagaaatattaagtcatgttagttcaactactaattatgaagatttaaaagatatggatttaataatagaagcatctgtagaagacatgaatataaagaaagatgttttcaagttactagatgaattatgtaaagaagatactatcttggcaacaaatacttcatcattatctataacagaaatagcttcttctactaagcgcccagataaagttataggaatgcatttctttaatccagttcctatgatgaaattagttgaagttataagtggtcagttaacatcaaaagttacttttgatacagtatttgaattatctaagagtatcaataaagtaccagtagatgtatctgaatctcctggatttgtagtaaatagaatacttatacctatgataaatgaagctgttggtatatatgcagatggtgttgcaagtaaagaagaaatagatgaagctatgaaattaggagcaaaccatccaatgggaccactagcattaggtgatttaatcggattagatgttgttttagctataatgaacgttttatatactgaatttggagatactaaatatagacctcatccacttttagctaaaatggttagagctaatcaattaggaagaaaaactaagataggattctatgattataataaataataagaaggagatatacatatgagtacaagtgatgttaaagtttatgagaatgtagctgttgaagtagatggaaatatatgtacagtgaaaatgaatagacctaaagcccttaatgcaataaattcaaagactttagaagaactttatgaagtatttgtagatattaataatgatgaaactattgatgttgtaatattgacaggggaaggaaaggcatttgtagctggagcagatattgcatacatgaaagatttagatgctgtagctgctaaagattttagtatcttaggagcaaaagcttttggagaaatagaaaatagtaaaaaagtagtgatagctgctgtaaacggatttgctttaggtggaggatgtgaacttgcaatggcatgtgatataagaattgcatctgctaaagctaaatttggtcagccagaagtaactcttggaataactccaggatatggaggaactcaaaggcttacaagattggttggaatggcaaaagcaaaagaattaatctttacaggtcaagttataaaagctgatgaagctgaaaaaatagggctagtaaatagagtcgttgagccagacattttaatagaagaagttgagaaattagctaagataatagctaaaaatgctcagcttgcagttagatactctaaagaagcaatacaacttggtgctcaaactgatataaatactggaatagatatagaatctaatttatttggtctttgtttttcaactaaagaccaaaaagaaggaatgtcagctttcgttgaaaagagagaagctaactttataaaagggtaataagaaggagatatacatatgagaagttttgaagaagtaattaagtttgcaaaagaaagaggacctaaaactatatcagtagcatgttgccaagataaagaagttttaatggcagttgaaatggctagaaaagaaaaaatagcaaatgccattttagtaggagatatagaaaagactaaagaaattgcaaaaagcatagacatggatatcgaaaattatgaactgatagatataaaagatttagcagaagcatctctaaaatctgttgaattagtttcacaaggaaaagccgacatggtaatgaaaggcttagtagacacatcaataatactaaaagcagttttaaataaagaagtaggtcttagaactggaaatgtattaagtcacgtagcagtatttgatgtagagggatatgatagattatttttcgtaactgacgcagctatgaacttagctcctgatacaaatactaaaaagcaaatcatagaaaatgcttgcacagtagcacattcattagatataagtgaaccaaaagttgctgcaatatgcgcaaaagaaaaagtaaatccaaaaatgaaagatacagttgaagctaaagaactagaagaaatgtatgaaagaggagaaatcaaaggttgtatggttggtgggccttttgcaattgataatgcagtatctttagaagcagctaaacataaaggtataaatcatcctgtagcaggacgagctgatatattattagccccagatattgaaggtggtaacatattatataaagctttggtattcttctcaaaatcaaaaaatgcaggagttatagttggggctaaagcaccaataatattaacttctagagcagacagtgaagaaactaaactaaactcaatagctttaggtgttttaatggcagcaaaggcataataagaaggagatatacatatgagcaaaatatttaaaatcttaacaataaatcctggttcgacatcaactaaaatagctgtatttgataatgaggatttagtatttgaaaaaactttaagacattcttcagaagaaataggaaaatatgagaaggtgtctgaccaatttgaatttcgtaaacaagtaatagaagaagctctaaaagaaggtggagtaaaaacatctgaattagatgctgtagtaggtagaggaggacttcttaaacctataaaaggtggtacttattcagtaagtgctgctatgattgaagatttaaaagtgggagttttaggagaacacgcttcaaacctaggtggaataatagcaaaacaaataggtgaagaagtaaatgttccttcatacatagtagaccctgttgttgtagatgaattagaagatgttgctagaatttctggtatgcctgaaataagtagagcaagtgtagtacatgctttaaatcaaaaggcaatagcaagaagatatgctagagaaataaacaagaaatatgaagatataaatcttatagttgcacacatgggtggaggagtttctgttggagctcataaaaatggtaaaatagtagatgttgcaaacgcattagatggagaaggacctttctctccagaaagaagtggtggactaccagtaggtgcattagtaaaaatgtgctttagtggaaaatatactcaagatgaaattaaaaagaaaataaaaggtaatggcggactagttgcatacttaaacactaatgatgctagagaagttgaagaaagaattgaagctggtgatgaaaaagctaaattagtatatgaagctatggcatatcaaatctctaaagaaataggagctagtgctgcagttcttaagggagatgtaaaagcaatattattaactggtggaatcgcatattcaaaaatgtttacagaaatgattgcagatagagttaaatttatagcagatgtaaaagtttatccaggtgaagatgaaatgattgcattagctcaaggtggacttagagttttaactggtgaagaagaggctcaagtttatgataactaataa

SEQ ID NO: 125 - DNA, 6862 bp, Artificial Sequence
  Synthetic
gtaaaacgacggccagtgaattcgttaagacccactttcacatttaagttgtttttctaatccgcatatgatcaattcaaggccgaataagaaggctggctctgcaccttggtgatcaaataattcgatagcttgtcgtaataatggcggcatactatcagtagtaggtgtttccctttcttctttagcgacttgatgctcttgatcttccaatacgcaacctaaagtaaaatgccccacagcgctgagtgcatataatgcattctctagtgaaaaaccttgttggcataaaaaggctaattgattttcgagagtttcatactgtttttctgtaggccgtgtacctaaatgtacttttgctccatcgcgatgacttagtaaagcacatctaaaacttttagcgttattacgtaaaaaatcttgccagctttccccttctaaagggcaaaagtgagtatggtgcctatctaacatctcaatggctaaggcgtcgagcaaagcccgcttattttttacatgccaatacaatgtaggctgctctacacctagcttctgggcgagtttacgggttgttaaaccttcgattccgacctcattaagcagctctaatgcgctgttaatcactttacttttatctaatctagacatcattaattcctaatttttgttgacactctatcattgatagagttattttaccactccctatcagtgatagagaaaagtgaactctagaaataattttgtttaactttaagaaggagatatacatatgatcgtaaaacctatggtacgcaacaatatctgcctgaacgcccatcctcagggctgcaagaagggagtggaagatcagattgaatataccaagaaacgcattaccgcagaagtcaaagctggcgcaaaagctccaaaaaacgttctggtgcttggctgctcaaatggttacggcctggcgagccgcattactgctgcgttcggatacggggctgcgaccatcggcgtgtcctttgaaaaagcgggttcagaaaccaaatatggtacaccgggatggtacaataatttggcatttgatgaagcggcaaaacgcgagggtctttatagcgtgacgatcgacggcgatgcgttttcagacgagatcaaggcccaggtaattgaggaagccaaaaaaaaaggtatcaaatttgatctgatcgtatacagcttggccagcccagtacgtactgatcctgatacaggtatcatgcacaaaagcgttttgaaaccctttggaaaaacgttcacaggcaaaacagtagatccgtttactggcgagctgaaggaaatctccgcggaaccagcaaatgacgaggaagcagccgccactgttaaagttatggggggtgaagattgggaacgttggattaagcagctgtcgaaggaaggcctcttagaagaaggctgtattaccttggcctatagttatattggccctgaagctacccaagctttgtaccgtaaaggcacaatcggcaaggccaaagaacacctggaggccacagcacaccgtctcaacaaagagaacccgtcaatccgtgccttcgtgagcgtgaataaaggcctggtaacccgcgcaagcgccgtaatcccggtaatccctctgtatctcgccagcttgttcaaagtaatgaaagagaagggcaatcatgaaggttgtattgaacagatcacgcgtctgtacgccgagcgcctgtaccgtaaagatggtacaattccagttgatgaggaaaatcgcattcgcattgatgattgggagttagaagaagacgtccagaaagcggtatccgcgttgatggagaaagtcacgggtgaaaacgcagaatctctcactgacttagcggggtaccgccatgatttcttagctagtaacggctttgatgtagaaggtattaattatgaagcggaagttgaacgcttcgaccgtatctgataagaaggagatatacatatgagagaagtagtaattgccagtgcagctagaacagcagtaggaagttttggaggagcatttaaatcagtttcagcggtagagttaggggtaacagcagctaaagaagctataaaaagagctaacataactccagatatgatagatgaatctcttttagggggagtacttacagcaggtcttggacaaaatatagcaagacaaatagcattaggagcaggaataccagtagaaaaaccagctatgactataaatatagtttgtggttctggattaagatctgtttcaatggcatctcaacttatagcattaggtgatgctgatataatgttagttggtggagctgaaaacatgagtatgtctccttatttagtaccaagtgcgagatatggtgcaagaatgggtgatgctgcttttgttgattcaatgataaaagatggattatcagacatatttaataactatcacatgggtattactgctgaaaacatagcagagcaatggaatataactagagaagaacaagatgaattagctcttgcaagtcaaaataaagctgaaaaagctcaagctgaaggaaaatttgatgaagaaatagttcctgttgttataaaaggaagaaaaggtgacactgtagtagataaagatgaatatattaagcctggcactacaatggagaaacttgctaagttaagacctgcatttaaaaaagatggaacagttactgctggtaatgcatcaggaataaatgatggtgctgctatgttagtagtaatggctaaagaaaaagctgaagaactaggaatagagcctcttgcaactatagtttcttatggaacagctggtgttgaccctaaaataatgggatatggaccagttccagcaactaaaaaagctttagaagctgctaatatgactattgaagatatagatttagttgaagctaatgaggcatttgctgcccaatctgtagctgtaataagagacttaaatatagatatgaataaagttaatgttaatggtggagcaatagctataggacatccaataggatgctcaggagcaagaatacttactacacttttatatgaaatgaagagaagagatgctaaaactggtcttgctacactttgtataggcggtggaatgggaactactttaatagttaagagatagtaagaaggagatatacatatgaaattagctgtaataggtagtggaactatgggaagtggtattgtacaaacttttgcaagttgtggacatgatgtatgtttaaagagtagaactcaaggtgctatagataaatgtttagctttattagataaaaatttaactaagttagttactaagggaaaaatggatgaagctacaaaagcagaaatattaagtcatgttagttcaactactaattatgaagatttaaaagatatggatttaataatagaagcatctgtagaagacatgaatataaagaaagatgttttcaagttactagatgaattatgtaaagaagatactatcttggcaacaaatacttcatcattatctataacagaaatagcttcttctactaagcgcccagataaagttataggaatgcatttctttaatccagttcctatgatgaaattagttgaagttataagtggtcagttaacatcaaaagttacttttgatacagtatttgaattatctaagagtatcaataaagtaccagtagatgtatctgaatctcctggatttgtagtaaatagaatacttatacctatgataaatgaagctgttggtatatatgcagatggtgttgcaagtaaagaagaaatagatgaagctatgaaattaggagcaaaccatccaatgggaccactagcattaggtgatttaatcggattagatgttgttttagctataatgaacgttttatatactgaatttggagatactaaatatagacctcatccacttttagctaaaatggttagagctaatcaattaggaagaaaaactaagataggattctatgattataataaataataagaaggagatatacatatgagtacaagtgatgttaaagtttatgagaatgtagctgttgaagtagatggaaatatatgtacagtgaaaatgaatagacctaaagcccttaatgcaataaattcaaagactttagaagaactttatgaagtatttgtagatattaataatgatgaaactattgatgttgtaatattgacaggggaaggaaaggcatttgtagctggagcagatattgcatacatgaaagatttagatgctgtagctgctaaagattttagtatcttaggagcaaaagcttttggagaaatagaaaatagtaaaaaagtagtgatagctgctgtaaacggatttgctttaggtggaggatgtgaacttgcaatggcatgtgatataagaattgcatctgctaaagctaaatttggtcagccagaagtaactcttggaataactccaggatatggaggaactcaaaggcttacaagattggttggaatggcaaaagcaaaagaattaatctttacaggtcaagttataaaagctgatgaagctgaaaaaatagggctagtaaatagagtcgttgagccagacattttaatagaagaagttgagaaattagctaagataatagctaaaaatgctcagcttgcagttagatactctaaagaagcaatacaacttggtgctcaaactgatataaatactggaatagatatagaatctaatttatttggtctttgtttttcaactaaagaccaaaaagaaggaatgtcagctttcgttgaaaagagagaagctaactttataaaagggtaataagaaggagatatacatatgagaagttttgaagaagtaattaagtttgcaaaagaaagaggacctaaaactatatcagtagcatgttgccaagataaagaagttttaatggcagttgaaatggctagaaaagaaaaaatagcaaatgccattttagtaggagatatagaaaagactaaagaaattgcaaaaagcatagacatggatatcgaaaattatgaactgatagatataaaagatttagcagaagcatctctaaaatctgttgaattagtttcacaaggaaaagccgacatggtaatgaaaggcttagtagacacatcaataatactaaaagcagttttaaataaagaagtaggtcttagaactggaaatgtattaagtcacgtagcagtatttgatgtagagggatatgatagattatttttcgtaactgacgcagctatgaacttagctcctgatacaaatactaaaaagcaaatcatagaaaatgcttgcacagtagcacattcattagatataagtgaaccaaaagttgctgcaatatgcgcaaaagaaaaagtaaatccaaaaatgaaagatacagttgaagctaaagaactagaagaaatgtatgaaagaggagaaatcaaaggttgtatggttggtgggccttttgcaattgataatgcagtatctttagaagcagctaaacataaaggtataaatcatcctgtagcaggacgagctgatatattattagccccagatattgaaggtggtaacatattatataaagctttggtattcttctcaaaatcaaaaaatgcaggagttatagttggggctaaagcaccaataatattaacttctagagcagacagtgaagaaactaaactaaactcaatagctttaggtgttttaatggcagcaaaggcataataagaaggagatatacatatgagcaaaatatttaaaatcttaacaataaatcctggttcgacatcaactaaaatagctgtatttgataatgaggatttagtatttgaaaaaactttaagacattcttcagaagaaataggaaaatatgagaaggtgtctgaccaatttgaatttcgtaaacaagtaatagaagaagctctaaaagaaggtggagtaaaaacatctgaattagatgctgtagtaggtagaggaggacttcttaaacctataaaaggtggtacttattcagtaagtgctgctatgattgaagatttaaaagtgggagttttaggagaacacgcttcaaacctaggtggaataatagcaaaacaaataggtgaagaagtaaatgttccttcatacatagtagaccctgttgttgtagatgaattagaagatgttgctagaatttctggtatgcctgaaataagtagagcaagtgtagtacatgctttaaatcaaaaggcaatagcaagaagatatgctagagaaataaacaagaaatatgaagatataaatcttatagttgcacacatgggtggaggagtttctgttggagctcataaaaatggtaaaatagtagatgttgcaaacgcattagatggagaaggacctttctctccagaaagaagtggtggactaccagtaggtgcattagtaaaaatgtgctttagtggaaaatatactcaagatgaaattaaaaagaaaataaaaggtaatggcggactagttgcatacttaaacactaatgatgctagagaagttgaagaaagaattgaagctggtgatgaaaaagctaaattagtatatgaagctatggcatatcaaatctctaaagaaataggagctagtgctgcagttcttaagggagatgtaaaagcaatattattaactggtggaatcgcatattcaaaaatgtttacagaaatgattgcagatagagttaaatttatagcagatgtaaaagtttatccaggtgaagatgaaatgattgcattagctcaaggtggacttagagttttaactggtgaagaagaggctcaagtttatgataactaataa

SEQ ID NO: 126 - DNA, 5719 bp, Artificial Sequence
  Synthetic
gtaaaacgacggccagtgaattcgttaagacccactttcacatttaagttgtttttctaatccgcatatgatcaattcaaggccgaataagaaggctggctctgcaccttggtgatcaaataattcgatagcttgtcgtaataatggcggcatactatcagtagtaggtgtttccctttcttctttagcgacttgatgctcttgatcttccaatacgcaacctaaagtaaaatgccccacagcgctgagtgcatataatgcattctctagtgaaaaaccttgttggcataaaaaggctaattgattttcgagagtttcatactgtttttctgtaggccgtgtacctaaatgtacttttgctccatcgcgatgacttagtaaagcacatctaaaacttttagcgttattacgtaaaaaatcttgccagctttccccttctaaagggcaaaagtgagtatggtgcctatctaacatctcaatggctaaggcgtcgagcaaagcccgcttattttttacatgccaatacaatgtaggctgctctacacctagcttctgggcgagtttacgggttgttaaaccttcgattccgacctcattaagcagctctaatgcgctgttaatcactttacttttatctaatctagacatcattaattcctaatttttgttgacactctatcattgatagagttattttaccactccctatcagtgatagagaaaagtgaactctagaaataattttgtttaactttaagaaggagatatacatatgatcgtaaaacctatggtacgcaacaatatctgcctgaacgcccatcctcagggctgcaagaagggagtggaagatcagattgaatataccaagaaacgcattaccgcagaagtcaaagctggcgcaaaagctccaaaaaacgttctggtgcttggctgctcaaatggttacggcctggcgagccgcattactgctgcgttcggatacggggctgcgaccatcggcgtgtcctttgaaaaagcgggttcagaaaccaaatatggtacaccgggatggtacaataatttggcatttgatgaagcggcaaaacgcgagggtctttatagcgtgacgatcgacggcgatgcgttttcagacgagatcaaggcccaggtaattgaggaagccaaaaaaaaaggtatcaaatttgatctgatcgtatacagcttggccagcccagtacgtactgatcctgatacaggtatcatgcacaaaagcgttttgaaaccctttggaaaaacgttcacaggcaaaacagtagatccgtttactggcgagctgaaggaaatctccgcggaaccagcaaatgacgaggaagcagccgccactgttaaagttatggggggtgaagattgggaacgttggattaagcagctgtcgaaggaaggcctcttagaagaaggctgtattaccttggcctatagttatattggccctgaagctacccaagctttgtaccgtaaaggcacaatcggcaaggccaaagaacacctggaggccacagcacaccgtctcaacaaagagaacccgtcaatccgtgccttcgtgagcgtgaataaaggcctggtaacccgcgcaagcgccgtaatcccggtaatccctctgtatctcgccagcttgttcaaagtaatgaaagagaagggcaatcatgaaggttgtattgaacagatcacgcgtctgtacgccgagcgcctgtaccgtaaagatggtacaattccagttgatgaggaaaatcgcattcgcattgatgattgggagttagaagaagacgtccagaaagcggtatccgcgttgatggagaaagtcacgggtgaaaacgcagaatctctcactgacttagcggggtaccgccatgatttcttagctagtaacggctttgatgtagaaggtattaattatgaagcggaagttgaacgcttcgaccgtatctgataagaaggagatatacatatgagagaagtagtaattgccagtgcagctagaacagcagtaggaagttttggaggagcatttaaatcagtttcagcggtagagttaggggtaacagcagctaaagaagctataaaaagagctaacataactccagatatgatagatgaatctcttttagggggagtacttacagcaggtcttggacaaaatatagcaagacaaatagcattaggagcaggaataccagtagaaaaaccagctatgactataaatatagtttgtggttctggattaagatctgtttcaatggcatctcaacttatagcattaggtgatgctgatataatgttagttggtggagctgaaaacatgagtatgtctccttatttagtaccaagtgcgagatatggtgcaagaatgggtgatgctgcttttgttgattcaatgataaaagatggattatcagacatatttaataactatcacatgggtattactgctgaaaacatagcagagcaatggaatataactagagaagaacaagatgaattagctcttgcaagtcaaaataaagctgaaaaagctcaagctgaaggaaaatttgatgaagaaatagttcctgttgttataaaaggaagaaaaggtgacactgtagtagataaagatgaatatattaagcctggcactacaatggagaaacttgctaagttaagacctgcatttaaaaaagatggaacagttactgctggtaatgcatcaggaataaatgatggtgctgctatgttagtagtaatggctaaagaaaaagctgaagaactaggaatagagcctcttgcaactatagtttcttatggaacagctggtgttgaccctaaaataatgggatatggaccagttccagcaactaaaaaagctttagaagctgctaatatgactattgaagatatagatttagttgaagctaatgaggcatttgctgcccaatctgtagctgtaataagagacttaaatatagatatgaataaagttaatgttaatggtggagcaatagctataggacatccaataggatgctcaggagcaagaatacttactacacttttatatgaaatgaagagaagagatgctaaaactggtcttgctacactttgtataggcggtggaatgggaactactttaatagttaagagatagtaagaaggagatatacatatgaaattagctgtaataggtagtggaactatgggaagtggtattgtacaaacttttgcaagttgtggacatgatgtatgtttaaagagtagaactcaaggtgctatagataaatgtttagctttattagataaaaatttaactaagttagttactaagggaaaaatggatgaagctacaaaagcagaaatattaagtcatgttagttcaactactaattatgaagatttaaaagatatggatttaataatagaagcatctgtagaagacatgaatataaagaaagatgttttcaagttactagatgaattatgtaaagaagatactatcttggcaacaaatacttcatcattatctataacagaaatagcttcttctactaagcgcccagataaagttataggaatgcatttctttaatccagttcctatgatgaaattagttgaagttataagtggtcagttaacatcaaaagttacttttgatacagtatttgaattatctaagagtatcaataaagtaccagtagatgtatctgaatctcctggatttgtagtaaatagaatacttatacctatgataaatgaagctgttggtatatatgcagatggtgttgcaagtaaagaagaaatagatgaagctatgaaattaggagcaaaccatccaatgggaccactagcattaggtgatttaatcggattagatgttgttttagctataatgaacgttttatatactgaatttggagatactaaatatagacctcatccacttttagctaaaatggttagagctaatcaattaggaagaaaaactaagataggattctatgattataataaataataagaaggagatatacatatgagtacaagtgatgttaaagtttatgagaatgtagctgttgaagtagatggaaatatatgtacagtgaaaatgaatagacctaaagcccttaatgcaataaattcaaagactttagaagaactttatgaagtatttgtagatattaataatgatgaaactattgatgttgtaatattgacaggggaaggaaaggcatttgtagctggagcagatattgcatacatgaaagatttagatgctgtagctgctaaagattttagtatcttaggagcaaaagcttttggagaaatagaaaatagtaaaaaagtagtgatagctgctgtaaacggatttgctttaggtggaggatgtgaacttgcaatggcatgtgatataagaattgcatctgctaaagctaaatttggtcagccagaagtaactcttggaataactccaggatatggaggaactcaaaggcttacaagattggttggaatggcaaaagcaaaagaattaatctttacaggtcaagttataaaagctgatgaagctgaaaaaatagggctagtaaatagagtcgttgagccagacattttaatagaagaagttgagaaattagctaagataatagctaaaaatgctcagcttgcagttagatactctaaagaagcaatacaacttggtgctcaaactgatataaatactggaatagatatagaatctaatttatttggtctttgtttttcaactaaagaccaaaaagaaggaatgtcagctttcgttgaaaagagagaagctaactttataaaagggtaataagaaggagatatacatatgagtcaggcgctaaaaaatttactgacattgttaaatctggaaaaaattgaggaaggactctttcgcggccagagtgaagatttaggtttacgccaggtgtttggcggccaggtcgtgggtcaggccttgtatgctgcaaaagagaccgtccctgaagagcggctggtacattcgtttcacagctactttcttcgccctggcgatagtaagaagccgattatttatgatgtcgaaacgctgcgtgacggtaacagcttcagcgcccgccgggttgctgctattcaaaacggcaaaccgattttttatatgactgcctctttccaggcaccagaagcgggtttcgaacatcaaaaaacaatgccgtccgcgccagcgcctgatggcctcccttcggaaacgcaaatcgcccaatcgctggcgcacctgctgccgccagtgctgaaagataaattcatctgcgatcgtccgctggaagtccgtccggtggagtttcataacccactgaaaggtcacgtcgcagaaccacatcgtcaggtgtggatccgcgcaaatggtagcgtgccggatgacctgcgcgttcatcagtatctgctcggttacgcttctgatcttaacttcctgccggtagctctacagccgcacggcatcggttttctcgaaccggggattcagattgccaccattgaccattccatgtggttccatcgcccgtttaatttgaatgaatggctgctgtatagcgtggagagcacctcggcgtccagcgcacgtggctttgtgcgcggtgagttttatacccaagacggcgtactggttgcctcgaccgttcaggaaggggtgatgcgtaatcacaattaa

SEQ ID NO: 127 - DNA, 180 bp, Artificial Sequence
  Synthetic
catttcctctcatcccatccggggtgagagtcttttcccccgacttatggctcatgcatgcatcaaaaaagatgtgagcttgatcaaaaacaaaaaatatttcactcgacaggagtatttatattgcgcccggatccctctagaaataattttgtttaactttaagaaggagatatacat

SEQ ID NO: 128 - DNA, 8058 bp, Artificial Sequence
  Synthetic
catttcctctcatcccatccggggtgagagtcttttcccccgacttatggctcatgcatgcatcaaaaaagatgtgagcttgatcaaaaacaaaaaatatttcactcgacaggagtatttatattgcgcccggatccctctagaaataattttgtttaactttaagaaggagatatacatatggatttaaattctaaaaaatatcagatgcttaaagagctatatgtaagcttcgctgaaaatgaagttaaacctttagcaacagaacttgatgaagaagaaagatttccttatgaaacagtggaaaaaatggcaaaagcaggaatgatgggtataccatatccaaaagaatatggtggagaaggtggagacactgtaggatatataatggcagttgaagaattgtctagagtttgtggtactacaggagttatattatcagctcatacatctcttggctcatggcctatatatcaatatggtaatgaagaacaaaaacaaaaattcttaagaccactagcaagtggagaaaaattaggagcatttggtcttactgagcctaatgctggtacagatgcgtctggccaacaaacaactgctgttttagacggggatgaatacatacttaatggctcaaaaatatttataacaaacgcaatagctggtgacatatatgtagtaatggcaatgactgataaatctaaggggaacaaaggaatatcagcatttatagttgaaaaaggaactcctgggtttagctttggagttaaagaaaagaaaatgggtataagaggttcagctacgagtgaattaatatttgaggattgcagaatacctaaagaaaatttacttggaaaagaaggtcaaggatttaagatagcaatgtctactcttgatggtggtagaattggtatagctgcacaagctttaggtttagcacaaggtgctcttgatgaaactgttaaatatgtaaaagaaagagtacaatttggtagaccattatcaaaattccaaaatacacaattccaattagctgatatggaagttaaggtacaagcggctagacaccttgtatatcaagcagctataaataaagacttaggaaaaccttatggagtagaagcagcaatggcaaaattatttgcagctgaaacagctatggaagttactacaaaagctgtacaacttcatggaggatatggatacactcgtgactatccagtagaaagaatgatgagagatgctaagataactgaaatatatgaaggaactagtgaagttcaaagaatggttatttcaggaaaactattaaaatagtaagaaggagatatacatatggaggaaggatttatgaatatagtcgtttgtataaaacaagttccagatacaacagaagttaaactagatcctaatacaggtactttaattagagatggagtaccaagtataataaaccctgatgataaagcaggtttagaagaagctataaaattaaaagaagaaatgggtgctcatgtaactgttataacaatgggacctcctcaagcagatatggctttaaaagaagctttagcaatgggtgcagatagaggtatattattaacagatagagcatttgcgggtgctgatacttgggcaacttcatcagcattagcaggagcattaaaaaatatagattttgatattataatagctggaagacaggcgatagatggagatactgcacaagttggacctcaaatagctgaacatttaaatcttccatcaataacatatgctgaagaaataaaaactgaaggtgaatatgtattagtaaaaagacaatttgaagattgttgccatgacttaaaagttaaaatgccatgccttataacaactcttaaagatatgaacacaccaagatacatgaaagttggaagaatatatgatgctttcgaaaatgatgtagtagaaacatggactgtaaaagatatagaagttgacccttctaatttaggtcttaaaggttctccaactagtgtatttaaatcatttacaaaatcagttaaaccagctggtacaatatacaatgaagatgcgaaaacatcagctggaattatcatagataaattaaaagagaagtatatcatataataagaaggagatatacatatgggtaacgttttagtagtaatagaacaaagagaaaatgtaattcaaactgtttctttagaattactaggaaaggctacagaaatagcaaaagattatgatacaaaagtttctgcattacttttaggtagtaaggtagaaggtttaatagatacattagcacactatggtgcagatgaggtaatagtagtagatgatgaagctttagcagtgtatacaactgaaccatatacaaaagcagcttatgaagcaataaaagcagctgaccctatagttgtattatttggtgcaacttcaataggtagagatttagcgcctagagtttctgctagaatacatacaggtcttactgctgactgtacaggtcttgcagtagctgaagatacaaaattattattaatgacaagacctgcctttggtggaaatataatggcaacaatagtttgtaaagatttcagacctcaaatgtctacagttagaccaggggttatgaagaaaaatgaacctgatgaaactaaagaagctgtaattaaccgtttcaaggtagaatttaatgatgctgataaattagttcaagttgtacaagtaataaaagaagctaaaaaacaagttaaaatagaagatgctaagatattagtttctgctggacgtggaatgggtggaaaagaaaacttagacatactttatgaattagctgaaattataggtggagaagtttctggttctcgtgccactatagatgcaggttggttagataaagcaagacaagttggtcaaactggtaaaactgtaagaccagacctttatatagcatgtggtatatctggagcaatacaacatatagctggtatggaagatgctgagtttatagttgctataaataaaaatccagaagctccaatatttaaatatgctgatgttggtatagttggagatgttcataaagtgcttccagaacttatcagtcagttaagtgttgcaaaagaaaaaggtgaagttttagctaactaataagaaggagatatacatatgagagaagtagtaattgccagtgcagctagaacagcagtaggaagttttggaggagcatttaaatcagtttcagcggtagagttaggggtaacagcagctaaagaagctataaaaagagctaacataactccagatatgatagatgaatctcttttagggggagtacttacagcaggtcttggacaaaatatagcaagacaaatagcattaggagcaggaataccagtagaaaaaccagctatgactataaatatagtttgtggttctggattaagatctgtttcaatggcatctcaacttatagcattaggtgatgctgatataatgttagttggtggagctgaaaacatgagtatgtctccttatttagtaccaagtgcgagatatggtgcaagaatgggtgatgctgcttttgttgattcaatgataaaagatggattatcagacatatttaataactatcacatgggtattactgctgaaaacatagcagagcaatggaatataactagagaagaacaagatgaattagctcttgcaagtcaaaataaagctgaaaaagctcaagctgaaggaaaatttgatgaagaaatagttcctgttgttataaaaggaagaaaaggtgacactgtagtagataaagatgaatatattaagcctggcactacaatggagaaacttgctaagttaagacctgcatttaaaaaagatggaacagttactgctggtaatgcatcaggaataaatgatggtgctgctatgttagtagtaatggctaaagaaaaagctgaagaactaggaatagagcctcttgcaactatagtttcttatggaacagctggtgttgaccctaaaataatgggatatggaccagttccagcaactaaaaaagctttagaagctgctaatatgactattgaagatatagatttagttgaagctaatgaggcatttgctgcccaatctgtagctgtaataagagacttaaatatagatatgaataaagttaatgttaatggtggagcaatagctataggacatccaataggatgctcaggagcaagaatacttactacacttttatatgaaatgaagagaagagatgctaaaactggtcttgctacactttgtataggcggtggaatgggaactactttaatagttaagagatagtaagaaggagatatacatatgaaattagctgtaataggtagtggaactatgggaagtggtattgtacaaacttttgcaagttgtggacatgatgtatgtttaaagagtagaactcaaggtgctatagataaatgtttagctttattagataaaaatttaactaagttagttactaagggaaaaatggatgaagctacaaaagcagaaatattaagtcatgttagttcaactactaattatgaagatttaaaagatatggatttaataatagaagcatctgtagaagacatgaatataaagaaagatgttttcaagttactagatgaattatgtaaagaagatactatcttggcaacaaatacttcatcattatctataacagaaatagcttcttctactaagcgcccagataaagttataggaatgcatttctttaatccagttcctatgatgaaattagttgaagttataagtggtcagttaacatcaaaagttacttttgatacagtatttgaattatctaagagtatcaataaagtaccagtagatgtatctgaatctcctggatttgtagtaaatagaatacttatacctatgataaatgaagctgttggtatatatgcagatggtgttgcaagtaaagaagaaatagatgaagctatgaaattaggagcaaaccatccaatgggaccactagcattaggtgatttaatcggattagatgttgttttagctataatgaacgttttatatactgaatttggagatactaaatatagacctcatccacttttagctaaaatggttagagctaatcaattaggaagaaaaactaagataggattctatgattataataaataataagaaggagatatacatatgagtacaagtgatgttaaagtttatgagaatgtagctgttgaagtagatggaaatatatgtacagtgaaaatgaatagacctaaagcccttaatgcaataaattcaaagactttagaagaactttatgaagtatttgtagatattaataatgatgaaactattgatgttgtaatattgacaggggaaggaaaggcatttgtagctggagcagatattgcatacatgaaagatttagatgctgtagctgctaaagattttagtatcttaggagcaaaagcttttggagaaatagaaaatagtaaaaaagtagtgatagctgctgtaaacggatttgctttaggtggaggatgtgaacttgcaatggcatgtgatataagaattgcatctgctaaagctaaatttggtcagccagaagtaactcttggaataactccaggatatggaggaactcaaaggcttacaagattggttggaatggcaaaagcaaaagaattaatctttacaggtcaagttataaaagctgatgaagctgaaaaaatagggctagtaaatagagtcgttgagccagacattttaatagaagaagttgagaaattagctaagataatagctaaaaatgctcagcttgcagttagatactctaaagaagcaatacaacttggtgctcaaactgatataaatactggaatagatatagaatctaatttatttggtctttgtttttcaactaaagaccaaaaagaaggaatgtcagctttcgttgaaaagagagaagctaactttataaaagggtaataagaaggagatatacatatgagaagttttgaagaagtaattaagtttgcaaaagaaagaggacctaaaactatatcagtagcatgttgccaagataaagaagttttaatggcagttgaaatggctagaaaagaaaaaatagcaaatgccattttagtaggagatatagaaaagactaaagaaattgcaaaaagcatagacatggatatcgaaaattatgaactgatagatataaaagatttagcagaagcatctctaaaatctgttgaattagtttcacaaggaaaagccgacatggtaatgaaaggcttagtagacacatcaataatactaaaagcagttttaaataaagaagtaggtcttagaactggaaatgtattaagtcacgtagcagtatttgatgtagagggatatgatagattatttttcgtaactgacgcagctatgaacttagctcctgatacaaatactaaaaagcaaatcatagaaaatgcttgcacagtagcacattcattagatataagtgaaccaaaagttgctgcaatatgcgcaaaagaaaaagtaaatccaaaaatgaaagatacagttgaagctaaagaactagaagaaatgtatgaaagaggagaaatcaaaggttgtatggttggtgggccttttgcaattgataatgcagtatctttagaagcagctaaacataaaggtataaatcatcctgtagcaggacgagctgatatattattagccccagatattgaaggtggtaacatattatataaagctttggtattcttctcaaaatcaaaaaatgcaggagttatagttggggctaaagcaccaataatattaacttctagagcagacagtgaagaaactaaactaaactcaatagctttaggtgttttaatggcagcaaaggcataataagaaggagatatacatatgagcaaaatatttaaaatcttaacaataaatcctggttcgacatcaactaaaatagctgtatttgataatgaggatttagtatttgaaaaaactttaagacattcttcagaagaaataggaaaatatgagaaggtgtctgaccaatttgaatttcgtaaacaagtaatagaagaagctctaaaagaaggtggagtaaaaacatctgaattagatgctgtagtaggtagaggaggacttcttaaacctataaaaggtggtacttattcagtaagtgctgctatgattgaagatttaaaagtgggagttttaggagaacacgcttcaaacctaggtggaataatagcaaaacaaataggtgaagaagtaaatgttccttcatacatagtagaccctgttgttgtagatgaattagaagatgttgctagaatttctggtatgcctgaaataagtagagcaagtgtagtacatgctttaaatcaaaaggcaatagcaagaagatatgctagagaaataaacaagaaatatgaagatataaatcttatagttgcacacatgggtggaggagtttctgttggagctcataaaaatggtaaaatagtagatgttgcaaacgcattagatggagaaggacctttctctccagaaagaagtggtggactaccagtaggtgcattagtaaaaatgtgctttagtggaaaatatactcaagatgaaattaaaaagaaaataaaaggtaatggcggactagttgcatacttaaacactaatgatgctagagaagttgaagaaagaattgaagctggtgatgaaaaagctaaattagtatatgaagctatggcatatcaaatctctaaagaaataggagctagtgctgcagttcttaagggagatgtaaaagcaatattattaactggtggaatcgcatattcaaaaatgtttacagaaatgattgcagatagagttaaatttatagcagatgtaaaagtttatccaggtgaagatgaaatgattgcattagctcaaggtggacttagagttttaactggtgaagaagaggctcaagtttatgataactaataa

SEQ ID NO: 129 - DNA, 6270 bp, Artificial Sequence
  Synthetic
catttcctctcatcccatccggggtgagagtcttttcccccgacttatggctcatgcatgcatcaaaaaagatgtgagcttgatcaaaaacaaaaaatatttcactcgacaggagtatttatattgcgcccggatccctctagaaataattttgtttaactttaagaaggagatatacatatgatcgtaaaacctatggtacgcaacaatatctgcctgaacgcccatcctcagggctgcaagaagggagtggaagatcagattgaatataccaagaaacgcattaccgcagaagtcaaagctggcgcaaaagctccaaaaaacgttctggtgcttggctgctcaaatggttacggcctggcgagccgcattactgctgcgttcggatacggggctgcgaccatcggcgtgtcctttgaaaaagcgggttcagaaaccaaatatggtacaccgggatggtacaataatttggcatttgatgaagcggcaaaacgcgagggtctttatagcgtgacgatcgacggcgatgcgttttcagacgagatcaaggcccaggtaattgaggaagccaaaaaaaaaggtatcaaatttgatctgatcgtatacagcttggccagcccagtacgtactgatcctgatacaggtatcatgcacaaaagcgttttgaaaccctttggaaaaacgttcacaggcaaaacagtagatccgtttactggcgagctgaaggaaatctccgcggaaccagcaaatgacgaggaagcagccgccactgttaaagttatggggggtgaagattgggaacgttggattaagcagctgtcgaaggaaggcctcttagaagaaggctgtattaccttggcctatagttatattggccctgaagctacccaagctttgtaccgtaaaggcacaatcggcaaggccaaagaacacctggaggccacagcacaccgtctcaacaaagagaacccgtcaatccgtgccttcgtgagcgtgaataaaggcctggtaacccgcgcaagcgccgtaatcccggtaatccctctgtatctcgccagcttgttcaaagtaatgaaagagaagggcaatcatgaaggttgtattgaacagatcacgcgtctgtacgccgagcgcctgtaccgtaaagatggtacaattccagttgatgaggaaaatcgcattcgcattgatgattgggagttagaagaagacgtccagaaagcggtatccgcgttgatggagaaagtcacgggtgaaaacgcagaatctctcactgacttagcggggtaccgccatgatttcttagctagtaacggctttgatgtagaaggtattaattatgaagcggaagttgaacgcttcgaccgtatctgataagaaggagatatacatatgagagaagtagtaattgccagtgcagctagaacagcagtaggaagttttggaggagcatttaaatcagtttcagcggtagagttaggggtaacagcagctaaagaagctataaaaagagctaacataactccagatatgatagatgaatctcttttagggggagtacttacagcaggtcttggacaaaatatagcaagacaaatagcattaggagcaggaataccagtagaaaaaccagctatgactataaatatagtttgtggttctggattaagatctgtttcaatggcatctcaacttatagcattaggtgatgctgatataatgttagttggtggagctgaaaacatgagtatgtctccttatttagtaccaagtgcgagatatggtgcaagaatgggtgatgctgcttttgttgattcaatgataaaagatggattatcagacatatttaataactatcacatgggtattactgctgaaaacatagcagagcaatggaatataactagagaagaacaagatgaattagctcttgcaagtcaaaataaagctgaaaaagctcaagctgaaggaaaatttgatgaagaaatagttcctgttgttataaaaggaagaaaaggtgacactgtagtagataaagatgaatatattaagcctggcactacaatggagaaacttgctaagttaagacctgcatttaaaaaagatggaacagttactgctggtaatgcatcaggaataaatgatggtgctgctatgttagtagtaatggctaaagaaaaagctgaagaactaggaatagagcctcttgcaactatagtttcttatggaacagctggtgttgaccctaaaataatgggatatggaccagttccagcaactaaaaaagctttagaagctgctaatatgactattgaagatatagatttagttgaagctaatgaggcatttgctgcccaatctgtagctgtaataagagacttaaatatagatatgaataaagttaatgttaatggtggagcaatagctataggacatccaataggatgctcaggagcaagaatacttactacacttttatatgaaatgaagagaagagatgctaaaactggtcttgctacactttgtataggcggtggaatgggaactactttaatagttaagagatagtaagaaggagatatacatatgaaattagctgtaataggtagtggaactatgggaagtggtattgtacaaacttttgcaagttgtggacatgatgtatgtttaaagagtagaactcaaggtgctatagataaatgtttagctttattagataaaaatttaactaagttagttactaagggaaaaatggatgaagctacaaaagcagaaatattaagtcatgttagttcaactactaattatgaagatttaaaagatatggatttaataatagaagcatctgtagaagacatgaatataaagaaagatgttttcaagttactagatgaattatgtaaagaagatactatcttggcaacaaatacttcatcattatctataacagaaatagcttcttctactaagcgcccagataaagttataggaatgcatttctttaatccagttcctatgatgaaattagttgaagttataagtggtcagttaacatcaaaagttacttttgatacagtatttgaattatctaagagtatcaataaagtaccagtagatgtatctgaatctcctggatttgtagtaaatagaatacttatacctatgataaatgaagctgttggtatatatgcagatggtgttgcaagtaaagaagaaatagatgaagctatgaaattaggagcaaaccatccaatgggaccactagcattaggtgatttaatcggattagatgttgttttagctataatgaacgttttatatactgaatttggagatactaaatatagacctcatccacttttagctaaaatggttagagctaatcaattaggaagaaaaactaagataggattctatgattataataaataataagaaggagatatacatatgagtacaagtgatgttaaagtttatgagaatgtagctgttgaagtagatggaaatatatgtacagtgaaaatgaatagacctaaagcccttaatgcaataaattcaaagactttagaagaactttatgaagtatttgtagatattaataatgatgaaactattgatgttgtaatattgacaggggaaggaaaggcatttgtagctggagcagatattgcatacatgaaagatttagatgctgtagctgctaaagattttagtatcttaggagcaaaagcttttggagaaatagaaaatagtaaaaaagtagtgatagctgctgtaaacggatttgctttaggtggaggatgtgaacttgcaatggcatgtgatataagaattgcatctgctaaagctaaatttggtcagccagaagtaactcttggaataactccaggatatggaggaactcaaaggcttacaagattggttggaatggcaaaagcaaaagaattaatctttacaggtcaagttataaaagctgatgaagctgaaaaaatagggctagtaaatagagtcgttgagccagacattttaatagaagaagttgagaaattagctaagataatagctaaaaatgctcagcttgcagttagatactctaaagaagcaatacaacttggtgctcaaactgatataaatactggaatagatatagaatctaatttatttggtctttgtttttcaactaaagaccaaaaagaaggaatgtcagctttcgttgaaaagagagaagctaactttataaaagggtaataagaaggagatatacatatgagaagttttgaagaagtaattaagtttgcaaaagaaagaggacctaaaactatatcagtagcatgttgccaagataaagaagttttaatggcagttgaaatggctagaaaagaaaaaatagcaaatgccattttagtaggagatatagaaaagactaaagaaattgcaaaaagcatagacatggatatcgaaaattatgaactgatagatataaaagatttagcagaagcatctctaaaatctgttgaattagtttcacaaggaaaagccgacatggtaatgaaaggcttagtagacacatcaataatactaaaagcagttttaaataaagaagtaggtcttagaactggaaatgtattaagtcacgtagcagtatttgatgtagagggatatgatagattatttttcgtaactgacgcagctatgaacttagctcctgatacaaatactaaaaagcaaatcatagaaaatgcttgcacagtagcacattcattagatataagtgaaccaaaagttgctgcaatatgcgcaaaagaaaaagtaaatccaaaaatgaaagatacagttgaagctaaagaactagaagaaatgtatgaaagaggagaaatcaaaggttgtatggttggtgggccttttgcaattgataatgcagtatctttagaagcagctaaacataaaggtataaatcatcctgtagcaggacgagctgatatattattagccccagatattgaaggtggtaacatattatataaagctttggtattcttctcaaaatcaaaaaatgcaggagttatagttggggctaaagcaccaataatattaacttctagagcagacagtgaagaaactaaactaaactcaatagctttaggtgttttaatggcagcaaaggcataataagaaggagatatacatatgagcaaaatatttaaaatcttaacaataaatcctggttcgacatcaactaaaatagctgtatttgataatgaggatttagtatttgaaaaaactttaagacattcttcagaagaaataggaaaatatgagaaggtgtctgaccaatttgaatttcgtaaacaagtaatagaagaagctctaaaagaaggtggagtaaaaacatctgaattagatgctgtagtaggtagaggaggacttcttaaacctataaaaggtggtacttattcagtaagtgctgctatgattgaagatttaaaagtgggagttttaggagaacacgcttcaaacctaggtggaataatagcaaaacaaataggtgaagaagtaaatgttccttcatacatagtagaccctgttgttgtagatgaattagaagatgttgctagaatttctggtatgcctgaaataagtagagcaagtgtagtacatgctttaaatcaaaaggcaatagcaagaagatatgctagagaaataaacaagaaatatgaagatataaatcttatagttgcacacatgggtggaggagtttctgttggagctcataaaaatggtaaaatagtagatgttgcaaacgcattagatggagaaggacctttctctccagaaagaagtggtggactaccagtaggtgcattagtaaaaatgtgctttagtggaaaatatactcaagatgaaattaaaaagaaaataaaaggtaatggcggactagttgcatacttaaacactaatgatgctagagaagttgaagaaagaattgaagctggtgatgaaaaagctaaattagtatatgaagctatggcatatcaaatctctaaagaaataggagctagtgctgcagttcttaagggagatgtaaaagcaatattattaactggtggaatcgcatattcaaaaatgtttacagaaatgattgcagatagagttaaatttatagcagatgtaaaagtttatccaggtgaagatgaaatgattgcattagctcaaggtggacttagagttttaactggtgaagaagaggctcaagtttatgataactaataa

SEQ ID NO: 130 - DNA, 5127 bp, Artificial Sequence
  Synthetic
catttcctctcatcccatccggggtgagagtcttttcccccgacttatggctcatgcatgcatcaaaaaagatgtgagcttgatcaaaaacaaaaaatatttcactcgacaggagtatttatattgcgcccggatccctctagaaataattttgtttaactttaagaaggagatatacatatgatcgtaaaacctatggtacgcaacaatatctgcctgaacgcccatcctcagggctgcaagaagggagtggaagatcagattgaatataccaagaaacgcattaccgcagaagtcaaagctggcgcaaaagctccaaaaaacgttctggtgcttggctgctcaaatggttacggcctggcgagccgcattactgctgcgttcggatacggggctgcgaccatcggcgtgtcctttgaaaaagcgggttcagaaaccaaatatggtacaccgggatggtacaataatttggcatttgatgaagcggcaaaacgcgagggtctttatagcgtgacgatcgacggcgatgcgttttcagacgagatcaaggcccaggtaattgaggaagccaaaaaaaaaggtatcaaatttgatctgatcgtatacagcttggccagcccagtacgtactgatcctgatacaggtatcatgcacaaaagcgttttgaaaccctttggaaaaacgttcacaggcaaaacagtagatccgtttactggcgagctgaaggaaatctccgcggaaccagcaaatgacgaggaagcagccgccactgttaaagttatggggggtgaagattgggaacgttggattaagcagctgtcgaaggaaggcctcttagaagaaggctgtattaccttggcctatagttatattggccctgaagctacccaagctttgtaccgtaaaggcacaatcggcaaggccaaagaacacctggaggccacagcacaccgtctcaacaaagagaacccgtcaatccgtgccttcgtgagcgtgaataaaggcctggtaacccgcgcaagcgccgtaatcccggtaatccctctgtatctcgccagcttgttcaaagtaatgaaagagaagggcaatcatgaaggttgtattgaacagatcacgcgtctgtacgccgagcgcctgtaccgtaaagatggtacaattccagttgatgaggaaaatcgcattcgcattgatgattgggagttagaagaagacgtccagaaagcggtatccgcgttgatggagaaagtcacgggtgaaaacgcagaatctctcactgacttagcggggtaccgccatgatttcttagctagtaacggctttgatgtagaaggtattaattatgaagcggaagttgaacgcttcgaccgtatctgataagaaggagatatacatatgagagaagtagtaattgccagtgcagctagaacagcagtaggaagttttggaggagcatttaaatcagtttcagcggtagagttaggggtaacagcagctaaagaagctataaaaagagctaacataactccagatatgatagatgaatctcttttagggggagtacttacagcaggtcttggacaaaatatagcaagacaaatagcattaggagcaggaataccagtagaaaaaccagctatgactataaatatagtttgtggttctggattaagatctgtttcaatggcatctcaacttatagcattaggtgatgctgatataatgttagttggtggagctgaaaacatgagtatgtctccttatttagtaccaagtgcgagatatggtgcaagaatgggtgatgctgcttttgttgattcaatgataaaagatggattatcagacatatttaataactatcacatgggtattactgctgaaaacatagcagagcaatggaatataactagagaagaacaagatgaattagctcttgcaagtcaaaataaagctgaaaaagctcaagctgaaggaaaatttgatgaagaaatagttcctgttgttataaaaggaagaaaaggtgacactgtagtagataaagatgaatatattaagcctggcactacaatggagaaacttgctaagttaagacctgcatttaaaaaagatggaacagttactgctggtaatgcatcaggaataaatgatggtgctgctatgttagtagtaatggctaaagaaaaagctgaagaactaggaatagagcctcttgcaactatagtttcttatggaacagctggtgttgaccctaaaataatgggatatggaccagttccagcaactaaaaaagctttagaagctgctaatatgactattgaagatatagatttagttgaagctaatgaggcatttgctgcccaatctgtagctgtaataagagacttaaatatagatatgaataaagttaatgttaatggtggagcaatagctataggacatccaataggatgctcaggagcaagaatacttactacacttttatatgaaatgaagagaagagatgctaaaactggtcttgctacactttgtataggcggtggaatgggaactactttaatagttaagagatagtaagaaggagatatacatatgaaattagctgtaataggtagtggaactatgggaagtggtattgtacaaacttttgcaagttgtggacatgatgtatgtttaaagagtagaactcaaggtgctatagataaatgtttagctttattagataaaaatttaactaagttagttactaagggaaaaatggatgaagctacaaaagcagaaatattaagtcatgttagttcaactactaattatgaagatttaaaagatatggatttaataatagaagcatctgtagaagacatgaatataaagaaagatgttttcaagttactagatgaattatgtaaagaagatactatcttggcaacaaatacttcatcattatctataacagaaatagcttcttctactaagcgcccagataaagttataggaatgcatttctttaatccagttcctatgatgaaattagttgaagttataagtggtcagttaacatcaaaagttacttttgatacagtatttgaattatctaagagtatcaataaagtaccagtagatgtatctgaatctcctggatttgtagtaaatagaatacttatacctatgataaatgaagctgttggtatatatgcagatggtgttgcaagtaaagaagaaatagatgaagctatgaaattaggagcaaaccatccaatgggaccactagcattaggtgatttaatcggattagatgttgttttagctataatgaacgttttatatactgaatttggagatactaaatatagacctcatccacttttagctaaaatggttagagctaatcaattaggaagaaaaactaagataggattctatgattataataaataataagaaggagatatacatatgagtacaagtgatgttaaagtttatgagaatgtagctgttgaagtagatggaaatatatgtacagtgaaaatgaatagacctaaagcccttaatgcaataaattcaaagactttagaagaactttatgaagtatttgtagatattaataatgatgaaactattgatgttgtaatattgacaggggaaggaaaggcatttgtagctggagcagatattgcatacatgaaagatttagatgctgtagctgctaaagattttagtatcttaggagcaaaagcttttggagaaatagaaaatagtaaaaaagtagtgatagctgctgtaaacggatttgctttaggtggaggatgtgaacttgcaatggcatgtgatataagaattgcatctgctaaagctaaatttggtcagccagaagtaactcttggaataactccaggatatggaggaactcaaaggcttacaagattggttggaatggcaaaagcaaaagaattaatctttacaggtcaagttataaaagctgatgaagctgaaaaaatagggctagtaaatagagtcgttgagccagacattttaatagaagaagttgagaaattagctaagataatagctaaaaatgctcagcttgcagttagatactctaaagaagcaatacaacttggtgctcaaactgatataaatactggaatagatatagaatctaatttatttggtctttgtttttcaactaaagaccaaaaagaaggaatgtcagctttcgttgaaaagagagaagctaactttataaaagggtaataagaaggagatatacatatgagtcaggcgctaaaaaatttactgacattgttaaatctggaaaaaattgaggaaggactctttcgcggccagagtgaagatttaggtttacgccaggtgtttggcggccaggtcgtgggtcaggccttgtatgctgcaaaagagaccgtccctgaagagcggctggtacattcgtttcacagctactttcttcgccctggcgatagtaagaagccgattatttatgatgtcgaaacgctgcgtgacggtaacagcttcagcgcccgccgggttgctgctattcaaaacggcaaaccgattttttatatgactgcctctttccaggcaccagaagcgggtttcgaacatcaaaaaacaatgccgtccgcgccagcgcctgatggcctcccttcggaaacgcaaatcgcccaatcgctggcgcacctgctgccgccagtgctgaaagataaattcatctgcgatcgtccgctggaagtccgtccggtggagtttcataacccactgaaaggtcacgtcgcagaaccacatcgtcaggtgtggatccgcgcaaatggtagcgtgccggatgacctgcgcgttcatcagtatctgctcggttacgcttctgatcttaacttcctgccggtagctctacagccgcacggcatcggttttctcgaaccggggattcagattgccaccattgaccattccatgtggttccatcgcccgtttaatttgaatgaatggctgctgtatagcgtggagagcacctcggcgtccagcgcacgtggctttgtgcgcggtgagttttatacccaagacggcgtactggttgcctcgaccgttcaggaaggggtgatgcgtaatcacaattaa

SEQ ID NO: 131 - DNA, 5160 bp, Artificial Sequence
  Synthetic
ggtaccagttgttcttattggtggtgttgctttatggttgcatcgtagtaaatggttgtaacaaaagcaatttttccggctgtctgtatacaaaaacgccgcaaagtttgagcgaagtcaataaactctctacccattcagggcaatatctctcttggatccaaagtgaactctagaaataattttgtttaactttaagaaggagatatacatatgatcgtaaaacctatggtacgcaacaatatctgcctgaacgcccatcctcagggctgcaagaagggagtggaagatcagattgaatataccaagaaacgcattaccgcagaagtcaaagctggcgcaaaagctccaaaaaacgttctggtgcttggctgctcaaatggttacggcctggcgagccgcattactgctgcgttcggatacggggctgcgaccatcggcgtgtcctttgaaaaagcgggttcagaaaccaaatatggtacaccgggatggtacaataatttggcatttgatgaagcggcaaaacgcgagggtctttatagcgtgacgatcgacggcgatgcgttttcagacgagatcaaggcccaggtaattgaggaagccaaaaaaaaaggtatcaaatttgatctgatcgtatacagcttggccagcccagtacgtactgatcctgatacaggtatcatgcacaaaagcgttttgaaaccctttggaaaaacgttcacaggcaaaacagtagatccgtttactggcgagctgaaggaaatctccgcggaaccagcaaatgacgaggaagcagccgccactgttaaagttatggggggtgaagattgggaacgttggattaagcagctgtcgaaggaaggcctcttagaagaaggctgtattaccttggcctatagttatattggccctgaagctacccaagctttgtaccgtaaaggcacaatcggcaaggccaaagaacacctggaggccacagcacaccgtctcaacaaagagaacccgtcaatccgtgccttcgtgagcgtgaataaaggcctggtaacccgcgcaagcgccgtaatcccggtaatccctctgtatctcgccagcttgttcaaagtaatgaaagagaagggcaatcatgaaggttgtattgaacagatcacgcgtctgtacgccgagcgcctgtaccgtaaagatggtacaattccagttgatgaggaaaatcgcattcgcattgatgattgggagttagaagaagacgtccagaaagcggtatccgcgttgatggagaaagtcacgggtgaaaacgcagaatctctcactgacttagcggggtaccgccatgatttcttagctagtaacggctttgatgtagaaggtattaattatgaagcggaagttgaacgcttcgaccgtatctgataagaaggagatatacatatgagagaagtagtaattgccagtgcagctagaacagcagtaggaagttttggaggagcatttaaatcagtttcagcggtagagttaggggtaacagcagctaaagaagctataaaaagagctaacataactccagatatgatagatgaatctcttttagggggagtacttacagcaggtcttggacaaaatatagcaagacaaatagcattaggagcaggaataccagtagaaaaaccagctatgactataaatatagtttgtggttctggattaagatctgtttcaatggcatctcaacttatagcattaggtgatgctgatataatgttagttggtggagctgaaaacatgagtatgtctccttatttagtaccaagtgcgagatatggtgcaagaatgggtgatgctgcttttgttgattcaatgataaaagatggattatcagacatatttaataactatcacatgggtattactgctgaaaacatagcagagcaatggaatataactagagaagaacaagatgaattagctcttgcaagtcaaaataaagctgaaaaagctcaagctgaaggaaaatttgatgaagaaatagttcctgttgttataaaaggaagaaaaggtgacactgtagtagataaagatgaatatattaagcctggcactacaatggagaaacttgctaagttaagacctgcatttaaaaaagatggaacagttactgctggtaatgcatcaggaataaatgatggtgctgctatgttagtagtaatggctaaagaaaaagctgaagaactaggaatagagcctcttgcaactatagtttcttatggaacagctggtgttgaccctaaaataatgggatatggaccagttccagcaactaaaaaagctttagaagctgctaatatgactattgaagatatagatttagttgaagctaatgaggcatttgctgcccaatctgtagctgtaataagagacttaaatatagatatgaataaagttaatgttaatggtggagcaatagctataggacatccaataggatgctcaggagcaagaatacttactacacttttatatgaaatgaagagaagagatgctaaaactggtcttgctacactttgtataggcggtggaatgggaactactttaatagttaagagatagtaagaaggagatatacatatgaaattagctgtaataggtagtggaactatgggaagtggtattgtacaaacttttgcaagttgtggacatgatgtatgtttaaagagtagaactcaaggtgctatagataaatgtttagctttattagataaaaatttaactaagttagttactaagggaaaaatggatgaagctacaaaagcagaaatattaagtcatgttagttcaactactaattatgaagatttaaaagatatggatttaataatagaagcatctgtagaagacatgaatataaagaaagatgttttcaagttactagatgaattatgtaaagaagatactatcttggcaacaaatacttcatcattatctataacagaaatagcttcttctactaagcgcccagataaagttataggaatgcatttctttaatccagttcctatgatgaaattagttgaagttataagtggtcagttaacatcaaaagttacttttgatacagtatttgaattatctaagagtatcaataaagtaccagtagatgtatctgaatctcctggatttgtagtaaatagaatacttatacctatgataaatgaagctgttggtatatatgcagatggtgttgcaagtaaagaagaaatagatgaagctatgaaattaggagcaaaccatccaatgggaccactagcattaggtgatttaatcggattagatgttgttttagctataatgaacgttttatatactgaatttggagatactaaatatagacctcatccacttttagctaaaatggttagagctaatcaattaggaagaaaaactaagataggattctatgattataataaataataagaaggagatatacatatgagtacaagtgatgttaaagtttatgagaatgtagctgttgaagtagatggaaatatatgtacagtgaaaatgaatagacctaaagcccttaatgcaataaattcaaagactttagaagaactttatgaagtatttgtagatattaataatgatgaaactattgatgttgtaatattgacaggggaaggaaaggcatttgtagctggagcagatattgcatacatgaaagatttagatgctgtagctgctaaagattttagtatcttaggagcaaaagcttttggagaaatagaaaatagtaaaaaagtagtgatagctgctgtaaacggatttgctttaggtggaggatgtgaacttgcaatggcatgtgatataagaattgcatctgctaaagctaaatttggtcagccagaagtaactcttggaataactccaggatatggaggaactcaaaggcttacaagattggttggaatggcaaaagcaaaagaattaatctttacaggtcaagttataaaagctgatgaagctgaaaaaatagggctagtaaatagagtcgttgagccagacattttaatagaagaagttgagaaattagctaagataatagctaaaaatgctcagcttgcagttagatactctaaagaagcaatacaacttggtgctcaaactgatataaatactggaatagatatagaatctaatttatttggtctttgtttttcaactaaagaccaaaaagaaggaatgtcagctttcgttgaaaagagagaagctaactttataaaagggtaataagaaggagatatacatatgagtcaggcgctaaaaaatttactgacattgttaaatctggaaaaaattgaggaaggactctttcgcggccagagtgaagatttaggtttacgccaggtgtttggcggccaggtcgtgggtcaggccttgtatgctgcaaaagagaccgtccctgaagagcggctggtacattcgtttcacagctactttcttcgccctggcgatagtaagaagccgattatttatgatgtcgaaacgctgcgtgacggtaacagcttcagcgcccgccgggttgctgctattcaaaacggcaaaccgattttttatatgactgcctctttccaggcaccagaagcgggtttcgaacatcaaaaaacaatgccgtccgcgccagcgcctgatggcctcccttcggaaacgcaaatcgcccaatcgctggcgcacctgctgccgccagtgctgaaagataaattcatctgcgatcgtccgctggaagtccgtccggtggagtttcataacccactgaaaggtcacgtcgcagaaccacatcgtcaggtgtggatccgcgcaaatggtagcgtgccggatgacctgcgcgttcatcagtatctgctcggttacgcttctgatcttaacttcctgccggtagctctacagccgcacggcatcggttttctcgaaccggggattcagattgccaccattgaccattccatgtggttccatcgcccgtttaatttgaatgaatggctgctgtatagcgtggagagcacctcggcgtccagcgcacgtggctttgtgcgcggtgagttttatacccaagacggcgtactggttgcctcgaccgttcaggaaggggtgatgcgtaatcacaattaa

SEQ ID NO: 132-133 - skipped (2 entries)

SEQ ID NO: 134 - DNA, 483 bp, Artificial Sequence
  Synthetic
atgagccccggacagggaactcaaagcgagaacagctgcacacattttccaggtaatcttccaaatatgcttcgtgacttgcgtgacgctttctctcgcgtgaaaaccttttttcagatgaaggatcagttagataatctgctgctgaaagaatcgcttcttgaggacttcaagggatatctgggatgtcaggcgttatctgagatgattcagttttatttggaagaagttatgccccaggctgagaatcaagaccctgacatcaaagcgcatgtgaatagcctgggcgagaatctgaagacactgcgcctgcgtcttcgccgctgtcaccgttttctgccttgcgaaaataagagtaaggccgttgagcaagtgaaaaatgctttcaacaagttacaagaaaaagggatttacaaagctatgtctgagtttgacattttcattaattacattgaggcctacatgactatgaagattcgcaat

SEQ ID NO: 135 - protein, 134 aa, Artificial Sequence
  Synthetic
MAPTSSSTKKTQLQLEHLLLDLQMILNGINNYKNPKLTRMLTFKFYMPKKATELKHLQCLEEELKPLEEVLNLAQSKNFHLRPRDLISNINVIVLELKGSETTFMCEYADETATIVEFLNRWITFCQSIISTLT

SEQ ID NO: 136 - protein, 179 aa, Artificial Sequence
  Synthetic
MAALQKSVSSFLMGTLATSCLLLLALLVQGGAAAPISSHCRLDKSNFQQPYITNRTFMLAKEASLADNNTDVRLIGEKLFHGVSMSERCYLMKQVLNFTLEEVLFPQSDRFQPYMQEVVPFLARLSNRLSTCHIEGDDLHIQRNVQKLKDTVKKLGESGEIKAIGELDLLFMSLRNACI

SEQ ID NO: 137 - protein, 243 aa, Artificial Sequence
  Synthetic
MGQTAGDLGWRLSLLLLPLLLVQAGVWGFPRPPGRPQLSLQELRREFTVSLHLARKLLSEVRGQAHRFAESHLPGVNLYLLPLGEQLPDVSLTFQAWRRLSDPERLCFISTTLQPFHALLGGLGTQGRWTNMERMQLWAMRLDLRDLQRHLRFQVLAAGFNLPEEEEEEEEEEEEERKGLLPGALGSALQGPAQVSWPQLLSTYRLLHSLELVLSRAVRELLLLSKAGHSVWPLGFPTLSPQP

SEQ ID NO: 138 - protein, 154 aa, Artificial Sequence [sequence omitted]

SEQ ID NO: 139 - protein, 33 aa, Artificial Sequence
  Synthetic
HADGSFSDEMNTILDNLAARDFINWLIQTKITD

SEQ ID NO: 140 - protein, 33 aa, Artificial Sequence
  Synthetic
HGDGSFSDEMNTILDNLAARDFINWLIQTKITD

SEQ ID NO: 141 - protein, 500 aa, Catharanthus roseus
MGSIDSTNVAMSNSPVGEFKPLEAEEFRKQAHRMVDFIADYYKNVETYPVLSEVEPGYLRKRIPETAPYLPEPLDDIMKDIQKDIIPGMTNWMSPNFYAFFPATVSSAAFLGEMLSTALNSVGFTWVSSPAATELEMIVMDWLAQILKLPKSFMFSGTGGGVIQNTTSESILCTIIAARERALEKLGPDSIGKLVCYGSDQTHTMFPKTCKLAGIYPNNIRLIPTTVETDFGISPQVLRKMVEDDVAAGYVPLFLCATLGTTSTTATDPVDSLSEIANEFGIWIHVDAAYAGSACICPEFRHYLDGIERVDSLSLSPHKWLLAYLDCTCLWVKQPHLLLRALTTNPEYLKNKQSDLDKVVDFKNWQIATGRKFRSLKLWLILRSYGVVNLQSHIRSDVAMGKMFEEWVRSDSRFEIVVPRNFSLVCFRLKPDVSSLHVEEVNKKLLDMLNSTGRVYMTHTIVGGIYMLRLAVGSSLTEEHHVRRVWDLIQKLTDDLLKEA

SEQ ID NO: 142 - protein, 417 aa, Clostridium sporogenes
MKFWRKYTQQEMDEKITESLEKTLNYDNTKTIGIPGTKLDDTVFYDDHSFVKHSPYLRTFIQNPNHIGCHTYDKADILFGGTFDIERELIQLLAIDVLNGNDEEFDGYVTQGGTEANIQAMWVYRNYFKKERKAKHEEIAIITSADTHYSAYKGSDLLNIDIIKVPVDFYSRKIQENTLDSIVKEAKEIGKKYFIVISNMGTTMFGSVDDPDLYANIFDKYNLEYKIHVDGAFGGFIYPIDNKECKTDFSNKNVSSITLDGHKMLQAPYGTGIFVSRKNLIHNTLTKEATYIENLDVTLSGSRSGSNAVAIWMVLASYGPYGWMEKINKLRNRTKWLCKQLNDMRIKYYKEDSMNIVTIEEQYVNKEIAEKYFLVPEVHNPTNNWYKIVVMEHVELDILNSLVYDLRKFNKEHLKAM

SEQ ID NO: 143 - protein, 757 aa, E. coli
MGSPSLYSARKTTLALAVALSFAWQAPVFAHGGEAHMVPMDKTLKEFGADVQWDDYAQLFTLIKDGAYVKVKPGAQTAIVNGQPLALQVPVVMKDNKAWVSDTFINDVFQSGLDQTFQVEKRPHPLNALTADEIKQAVEIVKASADFKPNTRFTEISLLPPDKEAVWAFALENKPVDQPRKADVIMLDGKHIIEAVVDLQNNKLLSWQPIKDAHGMVLLDDFASVQNIINNSEEFAAAVKKRGITDAKKVITTPLTVGYFDGKDGLKQDARLLKVISYLDVGDGNYWAHPIENLVAVVDLEQKKIVKIEEGPVVPVPMTARPFDGRDRVAPAVKPMQIIEPEGKNYTITGDMIHWRNWDFHLSMNSRVGPMISTVTYNDNGTKRKVMYEGSLGGMIVPYGDPDIGWYFKAYLDSGDYGMGTLTSPIARGKDAPSNAVLLNETIADYTGVPMEIPRAIAVFERYAGPEYKHQEMGQPNVSTERRELVVRWISTVGNYDYIFDWIFHENGTIGIDAGATGIEAVKGVKAKTMHDETAKDDTRYGTLIDHNIVGTTHQHIYNFRLDLDVDGENNSLVAMDPVVKPNTAGGPRTSTMQVNQYNIGNEQDAAQKFDPGTIRLLSNPNKENRMGNPVSYQIIPYAGGTHPVAKGAQFAPDEWIYHRLSFMDKQLWVTRYHPGERFPEGKYPNRSTHDTGLGQYSKDNESLDNTDAVVWMTTGTTHVARAEEWPIMPTEWVHTLLKPWNFFDETPTLGALKKDK

SEQ ID NO: 144 - protein, 1368 aa, Arabidopsis thaliana
MGEKAIDEDKVEAMKSSKTSLVFAINGQRFELELSSIDPSTTLVDFLRNKTPFKSVKLGCGEGGCGACVVLLSKYDPLLEKVDEFTISSCLTLLCSIDGCSITTSDGLGNSRVGFHAVHERIAGFHATQCGFCTPGMSVSMFSALLNADKSHPPPRSGFSNLTAVEAEKAVSGNLCRCTGYRPLVDACKSFAADVDIEDLGFNAFCKKGENRDEVLRRLPCYDHTSSHVCTFPEFLKKEIKNDMSLHSRKYRWSSPVSVSELQGLLEVENGLSVKLVAGNTSTGYYKEEKERKYERFIDIRKIPEFTMVRSDEKGVELGACVTISKAIEVLREEKNVSVLAKIATHMEKIANRFVRNTGTIGGNIMMAQRKQFPSDLATILVAAQATVKIMTSSSSQEQFTLEEFLQQPPLDAKSLLLSLEIPSWHSAKKNGSSEDSILLFETYRAAPRPLGNALAFLNAAFSAEVTEALDGIVVNDCQLVFGAYGTKHAHRAKKVEEFLTGKVISDEVLMEAISLLKDEIVPDKGTSNPGYRSSLAVTFLFEFFGSLTKKNAKTTNGWLNGGCKEIGFDQNVESLKPEAMLSSAQQIVENQEHSPVGKGITKAGACLQASGEAVYVDDIPAPENCLYGAFIYSTMPLARIKGIRFKQNRVPEGVLGIITYKDIPKGGQNIGTNGFFTSDLLFAEEVTHCAGQIIAFLVADSQKHADIAANLVVIDYDTKDLKPPILSLEEAVENFSLFEVPPPLRGYPVGDITKGMDEAEHKILGSKISFGSQYFFYMETQTALAVPDEDNCMVVYSSTQTPEFVHQTIAGCLGVPENNVRVITRRVGGGFGGKAVKSMPVAAACALAASKMQRPVRTYVNRKTDMITTGGRHPMKVTYSVGFKSNGKITALDVEVLLDAGLTEDISPLMPKGIQGALMKYDWGALSFNVKVCKTNTVSRTALRAPGDVQGSYIGEAIIEKVASYLSVDVDEIRKVNLHTYESLRLFHSAKAGEFSEYTLPLLWDRIDEFSGFNKRRKVVEEFNASNKWRKRGISRVPAVYAVNMRSTPGRVSVLGDGSIVVEVQGIEIGQGLWTKVKQMAAYSLGLIQCGTTSDELLKKIRVIQSDTLSMVQGSMTAGSTTSEASSEAVRICCDGLVERLLPVKTALVEQTGGPVTWDSLISQAYQQSINMSVSSKYMPDSTGEYLNYGIAASEVEVNVLTGETTILRTDIIYDCGKSLNPAVDLGQIEGAFVQGLGFFMLEEFLMNSDGLVVTDSTWTYKIPTVDTIPRQFNVEILNSGQHKNRVLSSKASGEPPLLLAASVHCAVRAAVKEARKQILSWNSNKQGTDMYFELPVPATMPIVKEFCGLDVVEKYLEWKIQQRKNV

SEQ ID NO: 145 - protein, 513 aa, S. cerevisae
MTAGSAPPVDYTSLKKNFQPFLSRRVENRSLKSFWDASDISDDVIELAGGMPNERFFPIESMDLKISKVPFNDNPKWHNSFTTAHLDLGSPSELPIARSFQYAETKGLPPLLHFVKDFVSRINRPAFSDETESNWDVILSGGSNDSMFKVFETICDESTTVMIEEFTFTPAMSNVEATGAKVIPIKMNLTFDRESQGIDVEYLTQLLDNWSTGPYKDLNKPRVLYTIATGQNPTGMSVPQWKREKIYQLAQRHDFLIVEDDPYGYLYFPSYNPQEPLENPYHSSDLTTERYLNDFLMKSFLTLDTDARVIRLETFSKIFAPGLRLSFIVANKFLLQKILDLADITTRAPSGTSQAIVYSTIKAMAESNLSSSLSMKEAMFEGWIRWIMQIASKYNHRKNLTLKALYETESYQAGQFTVMEPSAGMFIIIKINWGNFDRPDDLPQQMDILDKFLLKNGVKVVLGYKMAVCPNYSKQNSDFLRLTIAYARDDDQLIEASKRIGSGIKEFFDNYKS

SEQ ID NO: 146 - protein, 396 aa, E. coli
MFENITAAPADPILGLADLFRADERPGKINLGIGVYKDETGKTPVLTSVKKAEQYLLENETTKNYLGIDGIPEFGRCTQELLFGKGSALINDKRARTAQTPGGTGALRVAADFLAKNTSVKRVWVSNPSWPNHKSVFNSAGLEVREYAYYDAENHTLDFDALINSLNEAQAGDVVLFHGCCHNPTGIDPTLEQWQTLAQLSVEKGWLPLFDFAYQGFARGLEEDAEGLRAFAAMHKELIVASSYSKNFGLYNERVGACTLVAADSETVDRAFSQMKAAIRANYSNPPAHGASVVATILSNDALRAIWEQELTDMRQRIQRMRQLFVNTLQEKGANRDFSFIIKQNGMFSFSGLTKEQVLRLREEFGVYAVASGRVNVAGMTPDNMAPLCEAIVAVL

SEQ ID NO: 147 - protein, 391 aa, Arabidopsis thaliana
MVKLENSRKPEKISNKNIPMSDFVVNLDHGDPTAYEEYWRKMGDRCTVTIRGCDLMSYFSDMTNLCWFLEPELEDAIKDLHGVVGNAATEDRYIVVGTGSTQLCQAAVHALSSLARSQPVSVVAAAPFYSTYVEETTYVRSGMYKWEGDAWGFDKKGPYIELVTSPNNPDGTIRETVVNRPDDDEAKVIHDFAYYWPHYTPITRRQDHDIMLFTFSKITGHAGSRIGWALVKDKEVAKKMVEYIIVNSIGVSKESQVRTAKILNVLKETCKSESESENFFKYGREMMKNRWEKLREVVKESDAFTLPKYPEAFCNYFGKSLESYPAFAWLGTKEETDLVSELRRHKVMSRAGERCGSDKKHVRVSMLSREDVFNVFLERLANMKLIKSIDL

SEQ ID NO: 148 - protein, 504 aa, Streptomyces sp. TP-A0274
MTAPLQDSDGPDDAIGGPKQVTVIGAGIAGLVTAYELERLGHHVQIIEGSDDIGGRIHTHRFSGAGGPGPFAEMGAMRIPAGHRLTMHYIAELGLQNQVREFRTLFSDDAAYLPSSAGYLRVREAHDTLVDEFATGLPSAHYRQDTLLFGAWLDASIRAIAPRQFYDGLHNDIGVELLNLVDDIDLTPYRCGTARNRIDLHALFADHPRVRASCPPRLERFLDDVLDETSSSIVRLKDGMDELPRRLASRIRGKISLGQEVTGIDVHDDTVTLTVRQGLRTVTRTCDYVVCTIPFTVLRTLRLTGFDQDKLDIVHETKYWPATKIAFHCREPFWEKDGISGGASFTGGHVRQTYYPPAEGDPALGAVLLASYTIGPDAEALARMDEAERDALVAKELSVMHPELRRPGMVLAVAGRDWGARRWSRGAATVRWGQEAALREAERRECARPQKGLFFAGEHCSSKPAWIEGAIESAIDAAHEIEWYEPRASRVFAASRLSRSDRSA

SEQ ID NO: 149 - protein, 552 aa, Enterobacter cloacae
MRTPYCVADYLLDRLTDCGADHLFGVPGDYNLQFLDHVIDSPDICWVGCANELNASYAADGYARCKGFAALLTTFGVGELSAMNGIAGSYAEHVPVLHIVGAPGTAAQQRGELLHHTLGDGEFRHFYHMSEPITVAQAVLTEQNACYEIDRVLTTMLRERRPGYLMLPADVAKKAATPPVNALTHKQAHADSACLKAFRDAAENKLAMSKRTALLADFLVLRHGLKHALQKWVKEVPMAHATMLMGKGIFDERQAGFYGTYSGSASTGAVKEAIEGADTVLCVGTRFTDTLTAGFTHQLTPAQTIEVQPHAARVGDVWFTGIPMNQAIETLVELCKQHVHAGLMSSSSGAIPFPQPDGSLTQENFWRTLQTFIRPGDIILADQGTSAFGAIDLRLPADVNFIVQPLWGSIGYTLAAAFGAQTACPNRRVIVLTGDGAAQLTIQELGSMLRDKQHPIILVLNNEGYTVERAIHGAEQRYNDIALWNWTHIPQALSLDPQSECWRVSEAEQLADVLEKVAHHERLSLIEVMLPKADIPPLLGALTKALEACNNA

SEQ ID NO: 150 - protein, 497 aa, Ustilago maydis
MPTLNLDLPNGIKSTIQADLFINNKFVPALDGKTFATINPSTGKEIGQVAEASAKDVDLAVKAAREAFETTWGENTPGDARGRLLIKLAELVEANIDELAAIESLDNGKAFSIAKSFDVAAVAANLRYYGGWADKNHGKVMEVDTKRLNYTRHEPIGVCGQIIPWNFPLLMFAWKLGPALATGNTIVLKTAEQTPLSAIKMCELIVEAGFPPGVVNVISGFGPVAGAAISQHMDIDKIAFTGSTLVGRNIMKAAASTNLKKVTLELGGKSPNIIFKDADLDQAVRWSAFGIMFNHGQCCCAGSRVYVEESIYDAFMEKMTAHCKALQVGDPFSANTFQGPQVSQLQYDRIMEYIESGKKDANLALGGVRKGNEGYFIEPTIFTDVPHDAKIAKEEIFGPVVVVSKFKDEKDLIRIANDSIYGLAAAVFSRDISRAIETAHKLKAGTVWVNCYNQLIPQVPFGGYKASGIGRELGEYALSNYTNIKAVHVNLSQPAPI

SEQ ID NO: 151 - protein, 415 aa, Arabidopsis thaliana
MEFVTETLGKRIHDPYVEETRCLMIPGPIIVGSGPSGLATAACLKSRDIPSLILERSTCIASLWQHKTYDRLRLHLPKDFCELPLMPFPSSYPTYPTKQQFVQYLESYAEHFDLKPVFNQTVEEAKFDRRCGLWRVRTTGGKKDETMEYVSRWLVVATGENAEEVMPEIDGIPDFGGPILHTSSYKSGEIFSEKKILVVGCGNSGMEVCLDLCNFNALPSLVVRDSVHVLPQEMLGISTFGISTSLLKWFPVHVVDRFLLRMSRLVLGDTDRLGLVRPKLGPLERKIKCGKTPVLDVGTLAKIRSGHIKVYPELKRVMHYSAEFVDGRVDNFDAIILATGYKSNVPMWLKGVNMFSEKDGFPHKPFPNGWKGESGLYAVGFTKLGLLGAAIDAKKIAEDIEVQRHFLPLARPQHC

SEQ ID NO: 152 - protein, 557 aa, Pseudomonas savastanoi
MYDHFNSPSIDILYDYGPFLKKCEMTGGIGSYSAGTPTPRVAIVGAGISGLVAATELLRAGVKDVVLYESRDRIGGRVWSQVFDQTRPRYIAEMGAMRFPPSATGLFHYLKKFGISTSTTFPDPGVVDTELHYRGKRYHWPAGKKPPELFRRVYEGWQSLLSEGYLLEGGSLVAPLDITAMLKSGRLEEAAIAWQGWLNVFRDCSFYNAIVCIFTGRHPPGGDRWARPEDFELFGSLGIGSGGFLPVFQAGFTEILRMVINGYQSDQRLIPDGISSLAARLADQSFDGKALRDRVCFSRVGRISREAEKIIIQTEAGEQRVFDRVIVTSSNRAMQMIHCLTDSESFLSRDVARAVRETHLTGSSKLFILTRTKFWIKNKLPTTIQSDGLVRGVYCLDYQPDEPEGHGVVLLSYTWEDDAQKMLAMPDKKTRCQVLVDDLAAIHPTFASYLLPVDGDYERYVLHHDWLTDPHSAGAFKLNYPGEDVYSQRLFFQPMTANSPNKDTGLYLAGCSCSFAGGWIEGAVQTALNSACAVLRSTGGQLSKGNPLDCINASYRY

SEQ ID NO: 153 - protein, 455 aa, Pseudomonas savastanoi
MHEIITLESLCQALADGEIAAAELRERALDTEARLARLNCFIREGDAVSQFGEADHAMKGTPLWGMPVSFKDNICVRGLPLTAGTRGMSGFVSDQDAAIVSQLRALGAVVAGKNNMHELSFGVTSINPHWGTVGNPVAPGYCAGGSSGGSAAAVASGIVPLSVGTDTGGSIRIPAAFCGITGFRPTTGRWSTAGIIPVSHTKDCVGLLTRTAGDAGFLYGLLSGKQQSFPLSRTAPCRIGLPVSMWSDLDGEVERACVNALSLLRKTGFEFIEIDDADIVELNQTLTFTVPLYEFFADLAQSLLSLGWKHGIHHIFAQVDDANVKGIINHHLGEGAIKPAHYLSSLQNGELLKRKMDELFARHNIELLGYPTVPCRVPHLDHADRPEFFSQAIRNTDLASNAMLPSITIPVGPEGRLPVGLSFDALRGRDALLLSRVSAIEQVLGFVRKVLPHTT

SEQ ID NO: 154 - protein, 353 aa, Nostoc punctiforme NIES-2108
MLLFETVREMGHEQVLFCHSKNPEIKAIIAIHDTTLGPAMGATRILPYINEEAALKDALRLSRGMTYKAACANIPAGGGKAVIIANPENKTDDLLRAYGRFVDSLNGRFITGQDVNITPDDVRTISQETKYVVGVSEKSGGPAPITSLGVFLGIKAAVESRWQSKRLDGMKVAVQGLGNVGKNLCRHLHEHDVQLFVSDVDPIKAEEVKRLFGATVVEPTEIYSLDVDIFAPCALGGILNSHTIPFLQASIIAGAANNQLENEQLHSQMLAKKGILYSPDYVINAGGLINVYNEMIGYDEEKAFKQVHNIYDTLLAIFEIAKEQGVTTNDAARRLAEDRINNSKRSKSKAIAA

SEQ ID NO: 155 - protein, 541 aa, Arabidopsis thaliana
MNTFTSNSSDLTTTATETSSFSTLYLLSTLQAFVAITLVMLLKKLMTDPNKKKPYLPPGPTGWPIIGMIPTMLKSRPVFRWLHSIMKQLNTEIACVKLGNTHVITVTCPKIAREILKQQDALFASRPLTYAQKILSNGYKTCVITPFGDQFKKMRKVVMTELVCPARHRWLHQKRSEENDHLTAWVYNMVKNSGSVDFRFMTRHYCGNAIKKLMFGTRTFSKNTAPDGGPTVEDVEHMEAMFEALGFTFAFCISDYLPMLTGLDLNGHEKIMRESSAIMDKYHDPIIDERIKMWREGKRTQIEDFLDIFISIKDEQGNPLLTADEIKPTIKELVMAAPDNPSNAVEWAMAEMVNKPEILRKAMEEIDRVVGKERLVQESDIPKLNYVKAILREAFRLHPVAAFNLPHVALSDTTVAGYHIPKGSQVLLSRYGLGRNPKVWADPLCFKPERHLNECSEVTLTENDLRFISFSTGKRGCAAPALGTALTTMMLARLLQGFTWKLPENETRVELMESSHDMFLAKPLVMVGDLRLPEHLYPTVK

SEQ ID NO: 156 - protein, 543 aa, Arabidopsis thaliana
MDTLASNSSDLTTKSSLGMSSFTNMYLLTTLQALAALCFLMILNKIKSSSRNKKLHPLPPGPTGFPIVGMIPAMLKNRPVFRWLHSLMKELNTEIACVRLGNTHVIPVTCPKIAREIFKQQDALFASRPLTYAQKILSNGYKTCVITPFGEQFKKMRKVIMTEIVCPARHRWLHDNRAEETDHLTAWLYNMVKNSEPVDLRFVTRHYCGNAIKRLMFGTRTFSEKTEADGGPTLEDIEHMDAMFEGLGFTFAFCISDYLPMLTGLDLNGHEKIMRESSAIMDKYHDPIIDERIKMWREGKRTQIEDFLDIFISIKDEAGQPLLTADEIKPTIKELVMAAPDNPSNAVEWAIAEMINKPEILHKAMEEIDRVVGKERFVQESDIPKLNYVKAIIREAFRLHPVAAFNLPHVALSDTTVAGYHIPKGSQVLLSRYGLGRNPKVWSDPLSFKPERHLNECSEVTLTENDLRFISFSTGKRGCAAPALGTAITTMMLARLLQGFKWKLAGSETRVELMESSHDMFLSKPLVLVGELRLSEDLYPMVK

SEQ ID NO: 157 - protein, 503 aa, Arabidopis thaliana
MSNIQEMEMILSISLCLTTLITLLLLRRFLKRTATKVNLPPSPWRLPVIGNLHQLSLHPHRSLRSLSLRYGPLMLLHFGRVPILVVSSGEAAQEVLKTHDHKFANRPRSKAVHGLMNGGRDVVFAPYGEYWRQMKSVCILNLLTNKMVESFEKVREDEVNAMIEKLEKASSSSSSENLSELFITLPSDVTSRVALGRKHSEDETARDLKKRVRQIMELLGEFPIGEYVPILAWIDGIRGFNNKIKEVSRGFSDLMDKVVQEHLEASNDKADFVDILLSIEKDKNSGFQVQRNDIKFMILDMFIGGTSTTSTLLEWTMTELIRSPKSMKKLQDEIRSTIRPHGSYIKEKEVENMKYLKAVIKEVLRLHPSLPMILPRLLSEDVKVKGYNIAAGTEVIINAWAIQRDTAIWGPDAEEFKPERHLDSGLDYHGKNLNYIPFGSGRRICPGINLALGLAEVTVANLVGRFDWRVEAGPNGDQPDLTEAIGIDVCRKFPLIAFPSSVV

SEQ ID NO: 158 - protein, 560 aa, Arabidopsis thaliana
MAHLQRTFPTEMSKGRASFPKGFLFGTASSSYQYEGAVNEGARGQSVWDHFSNRFPHRISDSSDGNVAVDFYHRYKEDIKRMKDINMDSFRLSIAWPRVLPYGKRDRGVSEEGIKFYNDVIDELLANEITPLVTIFHWDIPQDLEDEYGGFLSEQIIDDFRDYASLCFERFGDRVSLWCTMNEPWVYSVAGYDTGRKAPGRCSKYVNGASVAGMSGYEAYIVSHNMLLAHAEAVEVFRKCDHIKNGQIGIAHNPLWYEPYDPSDPDDVEGCNRAMDFMLGWHQHPTACGDYPETMKKSVGDRLPSFTPEQSKKLIGSCDYVGINYYSSLFVKSIKHVDPTQPTWRTDQGVDWMKTNIDGKQIAKQGGSEWSFTYPTGLRNILKYVKKTYGNPPILITENGYGEVAEQSQSLYMYNPSIDTERLEYIEGHIHAIHQAIHEDGVRVEGYYVWSLLDNFEWNSGYGVRYGLYYIDYKDGLRRYPKMSALWLKEFLRFDQEDDSSTSKKEEKKESYGKQLLHSVQDSQFVHSIKDSGALPAVLGSLFVVSATVGTSLFFKGANN

SEQ ID NO: 159 - protein, 346 aa, Arabidopsis thaliana
MSSTKDMSTVQNATPFNGVAPSTTVRVTIVQSSTVYNDTPATIDKAEKYIVEAASKGAELVLFPEGFIGGYPRGFRFGLAVGVHNEEGRDEFRKYHASAIHVPGPEVARLADVARKNHVYLVMGAIEKEGYTLYCTVLFFSPQGQFLGKHRKLMPTSLERCIWGQGDGSTIPVYDTPIGKLGAAICWENRMPLYRTALYAKGIELYCAPTADGSKEWQSSMLHIAIEGGCFVLSACQFCQRKHFPDHPDYLFTDWYDDKEHDSIVSQGGSVIISPLGQVLAGPNFESEGLVTADIDLGDIARAKLYFDSVGHYSRPDVLHLTVNEHPRKSVTFVTKVEKAEDDSNK

SEQ ID NO: 160 - protein, 403 aa, Homo sapiens [sequence omitted]

SEQ ID NO: 161 - protein, 406 aa, Homo sapiens
MSGCPFLGNNFGYTFKKLPVEGSEEDKSQTGVNRASKGGLIYGNYLHLEKVLNAQELQSETKGNKIHDEHLFIITHQAYELWFKQILWELDSVREIFQNGHVRDERNMLKVVSRMHRVSVILKLLVQQFSILETMTALDFNDFREYLSPASGFQSLQFRLLENKIGVLQNMRVPYNRRHYRDNFKGEENELLLKSEQEKTLLELVEAWLERTPGLEPHGFNFWGKLEKNITRGLEEEFIRIQAKEESEEKEEQVAEFQKQKEVLLSLFDEKRHEHLLSKGERRLSYRALQGALMIYFYREEPRFQVPFQLLTSLMDIDSLMTKWRYNHVCMVHRMLGSKAGTGGSSGYHYLRSTVSDRYKVFVDLFNLSTYLIPRHWIPKMNPTIHKFLYTAEYCDSSYFSSDESD

SEQ ID NO: 162 - protein, 453 aa, S. cerevisiae
MNNTSITGPQVLHRTKMRPLPVLEKYCISPHHGFLDDRLPLTRLSSKKYMKWEEIVADLPSLLQEDNKVRSVIDGLDVLDLDETILGDVRELRRAYSILGFMAHAYIWASGTPRDVLPECIARPLLETAHILGVPPLATYSSLVLWNFKVTDECKKTETGCLDLENITTINTFTGTVDESWFYLVSVRFEKIGSACLNHGLQILRAIRSGDKGDANVIDGLEGLAATIERLSKALMEMELKCEPNVFYFKIRPFLAGWTNMSHMGLPQGVRYGAEGQYRIFSGGSNAQSSLIQTLDILLGVKHTANAAHSSQGDSKINYLDEMKKYMPREHREFLYHLESVCNIREYVSRNASNRALQEAYGRCISMLKIFRDNHIQIVTKYIILPSNSKQHGSNKPNVLSPIEPNTKASGCLGHKVASSKTIGTGGTRLMPFLKQCRDETVATADIKNEDKN

SEQ ID NO: 163 - protein, 305 aa, Mus musculus
MAFPSLSAGQNPWRNLSSEELEKQYSPSRWVIHTKPEEVVGNFVQIGSQATQKARATRRNQLDVPYGDGEGEKLDIYFPDEDSKAFPLFLFLHGGYWQSGSKDDSAFMVNPLTAQGIVVVIVAYDIAPKGTLDQMVDQVTRSVVFLQRRYPSNEGIYLCGHSAGAHLAAMVLLARWTKHGVTPNLQGFLLVSGIYDLEPLIATSQNDPLRMTLEDAQRNSPQRHLDVVPAQPVAPACPVLVLVGQHDSPEFHRQSKEFYETLLRVGWKASFQQLRGVDHFDIIENLTREDDVLTQIILKTVFQKL

SEQ ID NO: 164 - protein, 444 aa, S. cerevisae
MKQRFIRQFTNLMSTSRPKVVANKYFTSNTAKDVWSLTNEAAAKAANNSKNQGRELINLGQGFFSYSPPQFAIKEAQKALDIPMVNQYSPTRGRPSLINSLIKLYSPIYNTELKAENVTVTTGANEGILSCLMGLLNAGDEVIVFEPFFDQYIPNIELCGGKVVYVPINPPKELDQRNTRGEEWTIDFEQFEKAITSKTKAVIINTPHNPIGKVFTREELTTLGNICVKHNVVIISDEVYEHLYFTDSFTRIATLSPEIGQLTLTVGSAGKSFAATGWRIGWVLSLNAELLSYAAKAHTRICFASPSPLQEACANSINDALKIGYFEKMRQEYINKFKIFTSIFDELGLPYTAPEGTYFVLVDFSKVKIPEDYPYPEEILNKGKDFRISHWLINELGVVAIPPTEFYIKEHEKAAENLLRFAVCKDDAYLENAVERLKLLKDYL

SEQ ID NO: 165 - protein, 430 aa, Homo sapiens
MALLHSGRVLPGIAAAFHPGLAAAASARASSWWTHVEMGPPDPILGVTEAFKRDTNSKKMNLGVGAYRDDNGKPYVLPSVRKAEAQIAAKNLDKEYLPIGGLAEFCKASAELALGENSEVLKSGRFVTVQTISGTGALRIGASFLQRFFKFSRDVFLPKPTWGNHTPIFRDAGMQLQGYRYYDPKTCGFDFTGAVEDISKIPEQSVLLLHACAHNPTGVDPRPEQWKEIATVVKKRNLFAFFDMAYQGFASGDGDKDAWAVRHFIEQGINVCLCQSYAKNMGLYGERVGAFTMVCKDADEAKRVESQLKILIRPMYSNPPLNGARIAAAILNTPDLRKQWLQEVKVMADRIIGMRTQLVSNLKKEGSTHNWQHITDQIGMFCFTGLKPEQVERLIKEFSIYMTKDGRISVAGVTSSNVGYLAHAIHQVTK

SEQ ID NO: 166 - protein, 425 aa, Artificial Sequence
  Synthetic
MNYARFITAASAARNPSPIRTMTDILSRGPKSMISLAGGLPNPNMFPFKTAVITVENGKTIQFGEEMMKRALQYSPSAGIPELLSWLKQLQIKLHNPPTIHYPPSQGQMDLCVTSGSQQGLCKVFEMIINPGDNVLLDEPAYSGTLQSLHPLGCNIINVASDESGIVPDSLRDILSRWKPEDAKNPQKNTPKFLYTVPNGNNPTGNSLTSERKKEIYELARKYDFLIIEDDPYYFLQFNKFRVPTFLSMDVDGRVIRADSFSKIISSGLRIGFLTGPKPLIERVILHIQVSTLHPSTFNQLMISQLLHEWGEEGFMAHVDRVIDFYSNQKDAILAAADKWLTGLAEWHVPAAGMFLWIKVKGINDVKELIEEKAVKMGVLMLPGNAFYVDSSAPSPYLRASFSSASPEQMDVAFQVLAQLIKESL

SEQ ID NO: 167 - protein, 422 aa, Homo sapiens
MAKQLQARRLDGIDYNPWVEFVKLASEHDVVNLGQGFPDFPPPDFAVEAFQHAVSGDFMLNQYTKTFGYPPLTKILASFFGELLGQEIDPLRNVLVTVGGYGALFTAFQALVDEGDEVIIIEPFFDCYEPMTMMAGGRPVFVSLKPGPIQNGELGSSSNWQLDPMELAGKFTSRTKALVLNTPNNPLGKVFSREELELVASLCQQHDVVCITDEVYQWMVYDGHQHISIASLPGMWERTLTIGSAGKTFSATGWKVGWVLGPDHIMKHLRTVHQNSVFHCPTQSQAAVAESFEREQLLFRQPSSYFVQFPQAMQRCRDHMIRSLQSVGLKPIIPQGSYFLITDISDFKRKMPDLPGAVDEPYDRRFVKWMIKNKGLVAIPVSIFYSVPHQKHFDHYIRFCFVKDEATLQAMDEKLRKWKVEL

SEQ ID NO: 168 - protein, 454 aa, Homo sapiens
MFLAQRSLCSLSGRAKFLKTISSSKILGFSTSAKMSLKFTNAKRIEGLDSNVWIEFTKLAADPSVVNLGQGFPDISPPTYVKEELSKIAAIDSLNQYTRGFGHPSLVKALSYLYEKLYQKQIDSNKEILVTVGAYGSLFNTIQALIDEGDEVILIVPFYDCYEPMVRMAGATPVFIPLRSKPVYGKRWSSSDWTLDPQELESKFNSKTKAIILNTPHNPLGKVYNREELQVIADLCIKYDTLCISDEVYEWLVYSGNKHLKIATFPGMWERTITIGSAGKTFSVTGWKLGWSIGPNHLIKHLQTVQQNTIYTCATPLQEALAQAFWIDIKRMDDPECYFNSLPKELEVKRDRMVRLLESVGLKPIVPDGGYFIIADVSLLDPDLSDMKNNEPYDYKFVKWMTKHKKLSAIPVSAFCNSETKSQFEKFVRFCFIKKDSTLDAAEEIIKAWSVQKS

SEQ ID NO: 169 - protein, 444 aa, Cryptococcus deuterogattii R265
MTATTISIETVPQAPAAGTKTNGTSGKYNPRTYLSDRAKVTEIDGSDAGRPNPDTFPFNSITLNLKPPLGLPESSNNMPVSITIEDPDLATALQYAPSAGIPKLREWLADLQAHVHERPRGDYAISVGSGSQDLMFKGFQAVLNPGDPVLLETPMYSGVLPALRILKADYAEVDVDDQGLSAKNLEKVLSEWPADKKRPRVLYTSPIGSNPSGCSASKERKLEVLKVCKKYDVLIFEDDPYYYLAQELIPSYFALEKQVYPEGGHVVRFDSFSKLLSAGMRLGFATGPKEILHAIDVSTAGANLHTSAVSQGVALRLMQYWGIEGFLAHGRAVAKLYTERRAQFEATAHKYLDGLATWVSPVAGMFLWIDLRPAGIEDSYELIRHEALAKGVLGVPGMAFYPTGRKSSHVRVSFSIVDLEDESDLGFQRLAEAIKDKRKALGLA

SEQ ID NO: 170 - protein, 490 aa, Ruminococcus gnavus
MSQVIKKKRNTFMIGTEYILNSTQLEEAIKSFVHDFCAEKHEIHDQPVVVEAKEHQEDKIKQIKIPEKGRPVNEVVSEMMNEVYRYRGDANHPRFFSFVPGPASSVSWLGDIMTSAYNIHAGGSKLAPMVNCIEQEVLKWLAKQVGFTENPGGVFVSGGSMANITALTAARDNKLTDINLHLGTAYISDQTHSSVAKGLRIIGITDSRIRRIPTNSHFQMDTTKLEEAIETDKKSGYIPFVVIGTAGTTNTGSIDPLTEISALCKKHDMWFHIDGAYGASVLLSPKYKSLLTGTGLADSISWDAHKWLFQTYGCAMVLVKDIRNLFHSFHVNPEYLKDLENDIDNVNTWDIGMELTRPARGLKLWLTLQVLGSDLIGSAIEHGFQLAVWAEEALNPKKDWEIVSPAQMAMINFRYAPKDLTKEEQDILNEKISHRILESGYAAIFTTVLNGKTVLRICAIHPEATQEDMQHTIDLLDQYGREIYTEMKKA

SEQ ID NO: 171 - DNA, 1332 bp, Cryptococcus deuterogattii R265
atgacggcaactacaatttctattgagaccgtacctcaggccccggcggcggggaccaaaactaatgggacttcaggaaaatacaacccccgcacttacctgtccgaccgcgccaaagtcactgagattgatggatctgacgccggtcgccccaatcccgatactttcccatttaactcgattaccttaaatttgaaaccacctttaggcttgcccgagagttcaaataacatgccggtctctatcacgattgaagaccccgatttagcgacggccttacaatatgcacctagcgccggtattcctaagctgcgcgaatggctggctgacttacaagctcacgttcatgagcgcccccgtggcgattatgccatctcggtcgggtcggggtcacaggatttgatgtttaagggcttccaagctgtcttgaatccaggtgatccagtccttctggaaaccccaatgtattcaggtgttctgccagcgctgcgcattctgaaggcggattatgcagaagttgatgtagacgaccaggggttatctgctaaaaaccttgaaaaagttttatcagagtggcccgcagataagaagcgtcctcgtgtcctgtatacgtcgccaatcggctccaatccttccggatgttcagcatccaaggaacgcaagttagaggtactgaaagtctgtaagaagtacgatgtgctgatcttcgaagacgatccgtattattaccttgctcaagagcttattccatcctattttgcgttggaaaaacaagtttatccggagggtgggcacgttgtacgctttgactcatttagtaaattgctttctgctgggatgcgcttgggatttgctacagggccgaaggaaattcttcatgcgattgacgtcagtacagcaggcgcaaatttacatacttcagcggtctctcaaggtgtcgctcttcgcctgatgcagtattgggggatcgagggattccttgcacatggccgcgcggtggccaaactttacacggagcgccgcgctcagttcgaggcaaccgcacataagtacctggacgggctggccacttgggtatctcccgtagcgggaatgtttttatggatcgatcttcgtccagcaggaatcgaagattcttacgaattaattcgccatgaagcattagccaaaggcgttttaggcgttccagggatggcgttttatccgacaggccgtaagtcttcccatgttcgtgtcagtttcagtatcgtcgacctggaagacgaatctgaccttggttttcaacgcctggctgaagctattaaggataaacgcaaggctttagggctggct

SEQ ID NO: 172 - DNA, 1470 bp, Ruminococcus gnavus
atgagtcaagtgattaagaagaaacgtaacacctttatgatcggaacggagtacattcttaacagtacacaattggaggaagcgattaaatcattcgtacatgatttctgcgcagagaagcatgagatccatgatcaacctgtggtagtagaagctaaagaacatcaggaggacaaaatcaaacaaatcaaaatcccggaaaagggacgtcctgtaaatgaagtcgtttctgagatgatgaatgaagtgtatcgctaccgcggagacgccaaccatcctcgctttttttcttttgtgcccggacctgcaagcagtgtgtcgtggttgggggatattatgacgtccgcctacaatattcatgctggaggctcaaagctggcaccgatggttaactgcattgagcaggaagttctgaagtggttagcaaagcaagtggggttcacagaaaatccaggtggcgtatttgtgtcgggcggttcaatggcgaatattacggcacttactgcggctcgtgacaataaactgaccgacattaaccttcatttgggaactgcttatattagtgaccagactcatagttcagttgcgaaaggattacgcattattggaatcactgacagtcgcatccgtcgcattcccactaactcccacttccagatggataccaccaagctggaggaagccatcgagaccgacaagaagtctggctacattccgttcgtcgttatcggaacagcaggtaccaccaacactggttcgattgaccccctgacagaaatctctgcgttatgtaagaagcatgacatgtggtttcatatcgacggagcgtatggagctagtgttctgctgtcacctaagtacaagagccttcttaccggaaccggcttggctgacagtatttcgtgggatgctcataaatggttgttccaaacgtacggctgtgcaatggtacttgtcaaagatatccgtaatttattccactcttttcatgtgaatcccgagtatcttaaggatctggaaaacgacatcgataacgttaatacatgggacatcggcatggagctgacgcgccctgcacgcggtcttaaattgtggcttactttacaggtccttggatctgacttgattgggagtgccattgaacacggtttccagctggcagtttgggctgaggaagcattgaatccaaagaaagactgggagatcgtttctccagctcagatggctatgattaatttccgttatgcccctaaggatttaaccaaagaggaacaggatattctgaatgaaaagatctcccaccgcattttagagagcggatacgctgcaattttcactactgtattaaacggcaagaccgttttacgcatctgtgcaattcacccggaggcaactcaagaggatatgcaacacacaatcgacttattagaccaatacggtcgtgaaatctataccgagatgaagaaagcg

SEQ ID NO: 173 - protein, 412 aa, Clostridium sporogenes
MENNTNMFSGVKVIELANFIAAPAAGRFFADGGAEVIKIESPAGDPLRYTAPSEGRPLSQEENTTYDLENANKKAIVLNLKSEKGKKILHEMLAEADILLTNWRTKALVKQGLDYETLKEKYPKLVFAQITGYGEKGPDKDLPGFDYTAFFARGGVSGTLYEKGTVPPNVVPGLGDHQAGMFLAAGMAGALYKAKTTGQGDKVTVSLMHSAMYGLGIMIQAAQYKDHGLVYPINRNETPNPFIVSYKSKDDYFVQVCMPPYDVFYDRFMTALGREDLVGDERYNKIENLKDGRAKEVYSIIEQQMVTKTKDEWDKIFRDADIPFAIAQTWEDLLEDEQAWANDYLYKMKYPTGNERALVRLPVFFKEAGLPEYNQSPQIAENTVEVLKEMGYTEQEIEELEKDKDIMVRKEK

SEQ ID NO: 174 - protein, 407 aa, Clostridium sporogenes
MSDRNKEVKEKKAKHYLREITAKHYKEALEAKERGEKVGWCASNFPQEIATTLGVKVVYPENHAAAVAARGNGQNMCEHAEAMGFSNDVCGYARVNLAVMDIGHSEDQPIPMPDFVLCCNNICNQMIKWYEHIAKTLDIPMILIDIPYNTENTVSQDRIKYIRAQFDDAIKQLEEITGKKWDENKFEEVMKISQESAKQWLRAASYAKYKPSPFSGFDLFNHMAVAVCARGTQEAADAFKMLADEYEENVKTGKSTYRGEEKQRILFEGIACWPYLRHKLTKLSEYGMNVTATVYAEAFGVIYENMDELMAAYNKVPNSISFENALKMRLNAVTSTNTEGAVIHINRSCKLWSGFLYELARRLEKETGIPVVSFDGDQADPRNFSEAQYDTRIQGLNEVMVAKKEAE

SEQ ID NO: 175 - protein, 374 aa, Clostridium sporogenes
MSNSDKFFNDFKDIVENPKKYIMKHMEQTGQKAIGCMPLYTPEELVLAAGMFPVGVWGSNTELSKAKTYFPAFICSILQTTLENALNGEYDMLSGMMITNYCDSLKCMGQNFKLTVENIEFIPVTVPQNRKMEAGKEFLKSQYKMNIEQLEKISGNKITDESLEKAIEIYDEHRKVMNDFSMLASKYPGIITPTKRNYVMKSAYYMDKKEHTEKVRQLMDEIKAIEPKPFEGKRVITTGIIADSEDLLKILEENNIAIVGDDIAHESRQYRTLTPEANTPMDRLAEQFANRECSTLYDPEKKRGQYIVEMAKERKADGIIFFMTKFCDPEEYDYPQMKKDFEEAGIPHVLIETDMQMKNYEQARTAIQAFSETL

SEQ ID NO: 176 - protein, 377 aa, Clostridium sporogenes
MFFTEQHELIRKLARDFAEQEIEPIADEVDKTAEFPKEIVKKMAQNGFFGIKMPKEYGGAGADNRAYVTIMEEISRASGVAGIYLSSPNSLLGTPFLLVGTDEQKEKYLKPMIRGEKTLAFALTEPGAGSDAGALATTAREEGDYYILNGRKTFITGAPISDNIIVFAKTDMSKGTKGITTFIVDSKQEGVSFGKPEDKMGMIGCPTSDIILENVKVHKSDILGEVNKGFITAMKTLSVGRIGVASQALGIAQAAVDEAVKYAKQRKQFNRPIAKFQAIQFKLANMETKLNAAKLLVYNAAYKMDCGEKADKEASMAKYFAAESAIQIVNDALQIHGGYGYIKDYKIERLYRDVRVIAIYEGTSEVQQMVIASNLLK

SEQ ID NO: 177 - protein, 331 aa, Clostridium sporogenes
MKILAYCVRPDEVDSFKKFSEKYGHTVDLIPDSFGPNVAHLAKGYDGISILGNDTCNREALEKIKDCGIKYLATRTAGVNNIDFDAAKEFGINVANVPAYSPNSVSEFTIGLALSLTRKIPFALKRVELNNFALGGLIGVELRNLTLGVIGTGRIGLKVIEGFSGFGMKKMIGYDIFENEEAKKYIEYKSLDEVFKEADIITLHAPLTDDNYHMIGKESIAKMKDGVFIINAARGALIDSEALIEGLKSGKIAGAALDSYEYEQGVFHNNKMNEIMQDDTLERLKSFPNVVITPHLGFYTDEAVSNMVEITLMNLQEFELKGTCKNQRVCK

SEQ ID NO: 178 - protein, 334 aa, Clostridium sporogenes
MKILMYSVREHEKPAIKKWLEANPGVQIDLCNNALSEDTVCKAKEYDGIAIQQTNSIGGKAVYSTLKEYGIKQIASRTAGVDMIDLKMASDSNILVTNVPAYSPNAIAELAVTHTMNLLRNIKTLNKRIAYGDYRWSADLIAREVRSVTVGVVGTGKIGRTSAKLFKGLGANVIGYDAYPDKKLEENNLLTYKESLEDLLREADVVTLHTPLLESTKYMINKNNLKYMKPDAFIVNTGRGGIINTEDLIEALEQNKIAGAALDTFENEGLFLNKVVDPTKLPDSQLDKLLKMDQVLITHHVGFFTTTAVQNIVDTSLDSVVEVLKTNNSVNKVN

SEQ ID NO: 179 - protein, 326 aa, Rhodobacter sphaeroides; identical to SEQ ID NO: 60

SEQ ID NO: 180 - DNA, 6300 bp, Artificial Sequence
  Synthetic
ggtaccagttgttcttattggtggtgttgctttatggttgcatcgtagtaaatggttgtaacaaaagcaatttttccggctgtctgtatacaaaaacgccgcaaagtttgagcgaagtcaataaactctctacccattcagggcaatatctctcttggatccaaagtgaactctagaaataattttgtttaactttaagaaggagatatacatatgatcgtaaaacctatggtacgcaacaatatctgcctgaacgcccatcctcagggctgcaagaagggagtggaagatcagattgaatataccaagaaacgcattaccgcagaagtcaaagctggcgcaaaagctccaaaaaacgttctggtgcttggctgctcaaatggttacggcctggcgagccgcattactgctgcgttcggatacggggctgcgaccatcggcgtgtcctttgaaaaagcgggttcagaaaccaaatatggtacaccgggatggtacaataatttggcatttgatgaagcggcaaaacgcgagggtctttatagcgtgacgatcgacggcgatgcgttttcagacgagatcaaggcccaggtaattgaggaagccaaaaaaaaaggtatcaaatttgatctgatcgtatacagcttggccagcccagtacgtactgatcctgatacaggtatcatgcacaaaagcgttttgaaaccctttggaaaaacgttcacaggcaaaacagtagatccgtttactggcgagctgaaggaaatctccgcggaaccagcaaatgacgaggaagcagccgccactgttaaagttatggggggtgaagattgggaacgttggattaagcagctgtcgaaggaaggcctcttagaagaaggctgtattaccttggcctatagttatattggccctgaagctacccaagctttgtaccgtaaaggcacaatcggcaaggccaaagaacacctggaggccacagcacaccgtctcaacaaagagaacccgtcaatccgtgccttcgtgagcgtgaataaaggcctggtaacccgcgcaagcgccgtaatcccggtaatccctctgtatctcgccagcttgttcaaagtaatgaaagagaagggcaatcatgaaggttgtattgaacagatcacgcgtctgtacgccgagcgcctgtaccgtaaagatggtacaattccagttgatgaggaaaatcgcattcgcattgatgattgggagttagaagaagacgtccagaaagcggtatccgcgttgatggagaaagtcacgggtgaaaacgcagaatctctcactgacttagcggggtaccgccatgatttcttagctagtaacggctttgatgtagaaggtattaattatgaagcggaagttgaacgcttcgaccgtatctgataagaaggagatatacatatgagagaagtagtaattgccagtgcagctagaacagcagtaggaagttttggaggagcatttaaatcagtttcagcggtagagttaggggtaacagcagctaaagaagctataaaaagagctaacataactccagatatgatagatgaatctcttttagggggagtacttacagcaggtcttggacaaaatatagcaagacaaatagcattaggagcaggaataccagtagaaaaaccagctatgactataaatatagtttgtggttctggattaagatctgtttcaatggcatctcaacttatagcattaggtgatgctgatataatgttagttggtggagctgaaaacatgagtatgtctccttatttagtaccaagtgcgagatatggtgcaagaatgggtgatgctgcttttgttgattcaatgataaaagatggattatcagacatatttaataactatcacatgggtattactgctgaaaacatagcagagcaatggaatataactagagaagaacaagatgaattagctcttgcaagtcaaaataaagctgaaaaagctcaagctgaaggaaaatttgatgaagaaatagttcctgttgttataaaaggaagaaaaggtgacactgtagtagataaagatgaatatattaagcctggcactacaatggagaaacttgctaagttaagacctgcatttaaaaaagatggaacagttactgctggtaatgcatcaggaataaatgatggtgctgctatgttagtagtaatggctaaagaaaaagctgaagaactaggaatagagcctcttgcaactatagtttcttatggaacagctggtgttgaccctaaaataatgggatatggaccagttccagcaactaaaaaagctttagaagctgctaatatgactattgaagatatagatttagttgaagctaatgaggcatttgctgcccaatctgtagctgtaataagagacttaaatatagatatgaataaagttaatgttaatggtggagcaatagctataggacatccaataggatgctcaggagcaagaatacttactacacttttatatgaaatgaagagaagagatgctaaaactggtcttgctacactttgtataggcggtggaatgggaactactttaatagttaagagatagtaagaaggagatatacatatgaaattagctgtaataggtagtggaactatgggaagtggtattgtacaaacttttgcaagttgtggacatgatgtatgtttaaagagtagaactcaaggtgctatagataaatgtttagctttattagataaaaatttaactaagttagttactaagggaaaaatggatgaagctacaaaagcagaaatattaagtcatgttagttcaactactaattatgaagatttaaaagatatggatttaataatagaagcatctgtagaagacatgaatataaagaaagatgttttcaagttactagatgaattatgtaaagaagatactatcttggcaacaaatacttcatcattatctataacagaaatagcttcttctactaagcgcccagataaagttataggaatgcatttctttaatccagttcctatgatgaaattagttgaagttataagtggtcagttaacatcaaaagttacttttgatacagtatttgaattatctaagagtatcaataaagtaccagtagatgtatctgaatctcctggatttgtagtaaatagaatacttatacctatgataaatgaagctgttggtatatatgcagatggtgttgcaagtaaagaagaaatagatgaagctatgaaattaggagcaaaccatccaatgggaccactagcattaggtgatttaatcggattagatgttgttttagctataatgaacgttttatatactgaatttggagatactaaatatagacctcatccacttttagctaaaatggttagagctaatcaattaggaagaaaaactaagataggattctatgattataataaataataagaaggagatatacatatgagtacaagtgatgttaaagtttatgagaatgtagctgttgaagtagatggaaatatatgtacagtgaaaatgaatagacctaaagcccttaatgcaataaattcaaagactttagaagaactttatgaagtatttgtagatattaataatgatgaaactattgatgttgtaatattgacaggggaaggaaaggcatttgtagctggagcagatattgcatacatgaaagatttagatgctgtagctgctaaagattttagtatcttaggagcaaaagcttttggagaaatagaaaatagtaaaaaagtagtgatagctgctgtaaacggatttgctttaggtggaggatgtgaacttgcaatggcatgtgatataagaattgcatctgctaaagctaaatttggtcagccagaagtaactcttggaataactccaggatatggaggaactcaaaggcttacaagattggttggaatggcaaaagcaaaagaattaatctttacaggtcaagttataaaagctgatgaagctgaaaaaatagggctagtaaatagagtcgttgagccagacattttaatagaagaagttgagaaattagctaagataatagctaaaaatgctcagcttgcagttagatactctaaagaagcaatacaacttggtgctcaaactgatataaatactggaatagatatagaatctaatttatttggtctttgtttttcaactaaagaccaaaaagaaggaatgtcagctttcgttgaaaagagagaagctaactttataaaagggtaataagaaggagatatacatatgagaagttttgaagaagtaattaagtttgcaaaagaaagaggacctaaaactatatcagtagcatgttgccaagataaagaagttttaatggcagttgaaatggctagaaaagaaaaaatagcaaatgccattttagtaggagatatagaaaagactaaagaaattgcaaaaagcatagacatggatatcgaaaattatgaactgatagatataaaagatttagcagaagcatctctaaaatctgttgaattagtttcacaaggaaaagccgacatggtaatgaaaggcttagtagacacatcaataatactaaaagcagttttaaataaagaagtaggtcttagaactggaaatgtattaagtcacgtagcagtatttgatgtagagggatatgatagattatttttcgtaactgacgcagctatgaacttagctcctgatacaaatactaaaaagcaaatcatagaaaatgcttgcacagtagcacattcattagatataagtgaaccaaaagttgctgcaatatgcgcaaaagaaaaagtaaatccaaaaatgaaagatacagttgaagctaaagaactagaagaaatgtatgaaagaggagaaatcaaaggttgtatggttggtgggccttttgcaattgataatgcagtatctttagaagcagctaaacataaaggtataaatcatcctgtagcaggacgagctgatatattattagccccagatattgaaggtggtaacatattatataaagctttggtattcttctcaaaatcaaaaaatgcaggagttatagttggggctaaagcaccaataatattaacttctagagcagacagtgaagaaactaaactaaactcaatagctttaggtgttttaatggcagcaaaggcataataagaaggagatatacatatgagcaaaatatttaaaatcttaacaataaatcctggttcgacatcaactaaaatagctgtatttgataatgaggatttagtatttgaaaaaactttaagacattcttcagaagaaataggaaaatatgagaaggtgtctgaccaatttgaatttcgtaaacaagtaatagaagaagctctaaaagaaggtggagtaaaaacatctgaattagatgctgtagtaggtagaggaggacttcttaaacctataaaaggtggtacttattcagtaagtgctgctatgattgaagatttaaaagtgggagttttaggagaacacgcttcaaacctaggtggaataatagcaaaacaaataggtgaagaagtaaatgttccttcatacatagtagaccctgttgttgtagatgaattagaagatgttgctagaatttctggtatgcctgaaataagtagagcaagtgtagtacatgctttaaatcaaaaggcaatagcaagaagatatgctagagaaataaacaagaaatatgaagatataaatcttatagttgcacacatgggtggaggagtttctgttggagctcataaaaatggtaaaatagtagatgttgcaaacgcattagatggagaaggacctttctctccagaaagaagtggtggactaccagtaggtgcattagtaaaaatgtgctttagtggaaaatatactcaagatgaaattaaaaagaaaataaaaggtaatggcggactagttgcatacttaaacactaatgatgctagagaagttgaagaaagaattgaagctggtgatgaaaaagctaaattagtatatgaagctatggcatatcaaatctctaaagaaataggagctagtgctgcagttcttaagggagatgtaaaagcaatattattaactggtggaatcgcatattcaaaaatgtttacagaaatgattgcagatagagttaaatttatagcagatgtaaaagtttatccaggtgaagatgaaatgattgcattagctcaaggtggacttagagttttaactggtgaagaagaggctcaagtttatgataactaa

SEQ ID NO: 181 - DNA, 213 bp, Artificial Sequence
  Synthetic
ggtaccagttgttcttattggtggtgttgctttatggttgcatcgtagtaaatggttgtaacaaaagcaatttttccggctgtctgtatacaaaaacgccgcaaagtttgagcgaagtcaataaactctctacccattcagggcaatatctctcttggatccaaagtgaactctagaaataattttgtttaactttaagaaggagatatacat

SEQ ID NO: 182 - DNA, 43 bp, Artificial Sequence
  Synthetic
ctctagaaataattttgtttaactttaagaaggagatatacat

SEQ ID NO: 183 - DNA, 6939 bp, Artificial Sequence
  Synthetic
caaataaaacgaaaggctcagtcgaaagactgggcctttcgttttatctgttgtttgtcggtgaacgctctcctgagtaggacaaatccgccgggagcggatttgaacgttgcgaagcaacggcccggagggtggcgggcaggacgcccgccataaactgccaggcatcaaattaagcagaaggccatcctgacggatggcctttttgcgtggccagtgccaagcttgcatgcagattgcagcattacacgtcttgagcgattgtgtaggctggagctgcttcgaagttcctatactttctagagaataggaacttcggaataggaacttcatttaaatggcgcgccttacgccccgccctgccactcatcgcagtactgttgtattcattaagcatctgccgacatggaagccatcacaaacggcatgatgaacctgaatcgccagcggcatcagcaccttgtcgccttgcgtataatatttgcccatggtgaaaacgggggcgaagaagttgtccatattggccacgtttaaatcaaaactggtgaaactcacccagggattggctgagacgaaaaacatattctcaataaaccctttagggaaataggccaggttttcaccgtaacacgccacatcttgcgaatatatgtgtagaaactgccggaaatcgtcgtggtattcactccagagcgatgaaaacgtttcagtttgctcatggaaaacggtgtaacaagggtgaacactatcccatatcaccagctcaccgtctttcattgccatacgtaattccggatgagcattcatcaggcgggcaagaatgtgaataaaggccggataaaacttgtgcttatttttctttacggtctttaaaaaggccgtaatatccagctgaacggtctggttataggtacattgagcaactgactgaaatgcctcaaaatgttctttacgatgccattgggatatatcaacggtggtatatccagtgatttttttctccattttagcttccttagctcctgaaaatctcgacaactcaaaaaatacgcccggtagtgatcttatttcattatggtgaaagttggaacctcttacgtgccgatcaacgtctcattttcgccaaaagttggcccagggcttcccggtatcaacagggacaccaggatttatttattctgcgaagtgatcttccgtcacaggtaggcgcgccgaagttcctatactttctagagaataggaacttcggaataggaactaaggaggatattcatatggaccatggctaattcccaggtaccagttgttcttattggtggtgttgctttatggttgcatcgtagtaaatggttgtaacaaaagcaatttttccggctgtctgtatacaaaaacgccgcaaagtttgagcgaagtcaataaactctctacccattcagggcaatatctctcttggatccaaagtgaactctagaaataattttgtttaactttaagaaggagatatacatatgtctaacgtgcaggagtggcaacagcttgccaacaaggaattgagccgtcgggagaaaactgtcgactcgctggttcatcaaaccgcggaagggatcgccatcaagccgctgtataccgaagccgatctcgataatctggaggtgacaggtacccttcctggtttgccgccctacgttcgtggcccgcgtgccactatgtataccgcccaaccgtggaccatccgtcagtatgctggtttttcaacagcaaaagagtccaacgctttttatcgccgtaacctggccgccgggcaaaaaggtctttccgttgcgtttgaccttgccacccaccgtggctacgactccgataacccgcgcgtggcgggcgacgtcggcaaagcgggcgtcgctatcgacaccgtggaagatatgaaagtcctgttcgaccagatcccgctggataaaatgtcggtttcgatgaccatgaatggcgcagtgctaccagtactggcgttttatatcgtcgccgcagaagagcaaggtgttacacctgataaactgaccggcaccattcaaaacgatattctcaaagagtacctctgccgcaacacctatatttacccaccaaaaccgtcaatgcgcattatcgccgacatcatcgcctggtgttccggcaacatgccgcgatttaataccatcagtatcagcggttaccacatgggtgaagcgggtgccaactgcgtgcagcaggtagcatttacgctcgctgatgggattgagtacatcaaagcagcaatctctgccggactgaaaattgatgacttcgctcctcgcctgtcgttcttcttcggcatcggcatggatctgtttatgaacgtcgccatgttgcgtgcggcacgttatttatggagcgaagcggtcagtggatttggcgcacaggacccgaaatcactggcgctgcgtacccactgccagacctcaggctggagcctgactgaacaggatccgtataacaacgttatccgcaccaccattgaagcgctggctgcgacgctgggcggtactcagtcactgcataccaacgcctttgacgaagcgcttggtttgcctaccgatttctcagcacgcattgcccgcaacacccagatcatcatccaggaagaatcagaactctgccgcaccgtcgatccactggccggatcctattacattgagtcgctgaccgatcaaatcgtcaaacaagccagagctattatccaacagatcgacgaagccggtggcatggcgaaagcgatcgaagcaggtctgccaaaacgaatgatcgaagaggcctcagcgcgcgaacagtcgctgatcgaccagggcaagcgtgtcatcgttggtgtcaacaagtacaaactggatcacgaagacgaaaccgatgtacttgagatcgacaacgtgatggtgcgtaacgagcaaattgcttcgctggaacgcattcgcgccacccgtgatgatgccgccgtaaccgccgcgttgaacgccctgactcacgccgcacagcataacgaaaacctgctggctgccgctgttaatgccgctcgcgttcgcgccaccctgggtgaaatttccgatgcgctggaagtcgctttcgaccgttatctggtgccaagccagtgtgttaccggcgtgattgcgcaaagctatcatcagtctgagaaatcggcctccgagttcgatgccattgttgcgcaaacggagcagttccttgccgacaatggtcgtcgcccgcgcattctgatcgctaagatgggccaggatggacacgatcgcggcgcgaaagtgatcgccagcgcctattccgatctcggtttcgacgtagatttaagcccgatgttctctacacctgaagagatcgcccgcctggccgtagaaaacgacgttcacgtagtgggcgcatcctcactggctgccggtcataaaacgctgatcccggaactggtcgaagcgctgaaaaaatggggacgcgaagatatctgcgtggtcgcgggtggcgtcattccgccgcaggattacgccttcctgcaagagcgcggcgtggcggcgatttatggtccaggtacacctatgctcgacagtgtgcgcgacgtactgaatctgataagccagcatcatgattaatgaagccacgctggcagaaagtattcgccgcttacgtcagggtgagcgtgccacactcgcccaggccatgacgctggtggaaagccgtcacccgcgtcatcaggcactaagtacgcagctgcttgatgccattatgccgtactgcggtaacaccctgcgactgggcgttaccggcacccccggcgcggggaaaagtacctttcttgaggcctttggcatgttgttgattcgagagggattaaaggtcgcggttattgcggtcgatcccagcagcccggtcactggcggtagcattctcggggataaaacccgcatgaatgacctggcgcgtgccgaagcggcgtttattcgcccggtaccatcctccggtcatctgggcggtgccagtcagcgagcgcgggaattaatgctgttatgcgaagcagcgggttatgacgtagtgattgtcgaaacggttggcgtcgggcagtcggaaacagaagtcgcccgcatggtggactgttttatctcgttgcaaattgccggtggcggcgatgatctgcagggcattaaaaaagggctgatggaagtggctgatctgatcgttatcaacaaagacgatggcgataaccataccaatgtcgccattgcccggcatatgtacgagagtgccctgcatattctgcgacgtaaatacgacgaatggcagccacgggttctgacttgtagcgcactggaaaaacgtggaatcgatgagatctggcacgccatcatcgacttcaaaaccgcgctaactgccagtggtcgtttacaacaagtgcggcaacaacaatcggtggaatggctgcgtaagcagaccgaagaagaagtactgaatcacctgttcgcgaatgaagatttcgatcgctattaccgccagacgcttttagcggtcaaaaacaatacgctctcaccgcgcaccggcctgcggcagctcagtgaatttatccagacgcaatattttgattaaaggaatttttatgtcttatcagtatgttaacgttgtcactatcaacaaagtggcggtcattgagtttaactatggccgaaaacttaatgccttaagtaaagtctttattgatgatcttatgcaggcgttaagcgatctcaaccggccggaaattcgctgtatcattttgcgcgcaccgagtggatccaaagtcttctccgcaggtcacgatattcacgaactgccgtctggcggtcgcgatccgctctcctatgatgatccattgcgtcaaatcacccgcatgatccaaaaattcccgaaaccgatcatttcgatggtggaaggtagtgtttggggtggcgcatttgaaatgatcatgagttccgatctgatcatcgccgccagtacctcaaccttctcaatgacgcctgtaaacctcggcgtcccgtataacctggtcggcattcacaacctgacccgcgacgcgggcttccacattgtcaaagagctgatttttaccgcttcgccaatcaccgcccagcgcgcgctggctgtcggcatcctcaaccatgttgtggaagtggaagaactggaagatttcaccttacaaatggcgcaccacatctctgagaaagcgccgttagccattgccgttatcaaagaagagctgcgtgtactgggcgaagcacacaccatgaactccgatgaatttgaacgtattcaggggatgcgccgcgcggtgtatgacagcgaagattaccaggaagggatgaacgctttcctcgaaaaacgtaaacctaatttcgttggtcattaatccctgcgaacgaaggagtaaaaatggaaactcagtggacaaggatgaccgccaatgaagcggcagaaattatccagcataacgacatggtggcatttagcggctttaccccggcgggttcgccgaaagccctacccaccgcgattgcccgcagagctaacgaacagcatgaggccaaaaagccgtatcaaattcgccttctgacgggtgcgtcaatcagcgccgccgctgacgatgtactttctgacgccgatgctgtttcctggcgtgcgccatatcaaacatcgtccggtttacgtaaaaagatcaatcagggcgcggtgagtttcgttgacctgcatttgagcgaagtggcgcaaatggtcaattacggtttcttcggcgacattgatgttgccgtcattgaagcatcggcactggcaccggatggtcgagtctggttaaccagcgggatcggtaatgcgccgacctggctgctgcgggcgaagaaagtgatcattgaactcaatcactatcacgatccgcgcgttgcagaactggcggatattgtgattcctggcgcgccaccgcggcgcaatagcgtgtcgatcttccatgcaatggatcgcgtcggtacccgctatgtgcaaatcgatccgaaaaagattgtcgccgtcgtggaaaccaacttgcccgacgccggtaatatgctggataagcaaaatcccatgtgccagcagattgccgataacgtggtcacgttcttattgcaggaaatggcgcatgggcgtattccgccggaatttctgccgctgcaaagtggcgtgggcaatatcaataatgcggtaatggcgcgtctgggggaaaacccggtaattcctccgtttatgatgtattcggaagtgctacaggaatcggtggtgcatttactggaaaccggcaaaatcagcggggccagcgcctccagcctgacaatctcggccgattccctgcgcaagatttacgacaatatggattactttgccagccgcattgtgttgcgtccgcaggagatttccaataacccggaaatcatccgtcgtctgggcgtcatcgctctgaacgtcggcctggagtttgatatttacgggcatgccaactcaacacacgtagccggggtcgatctgatgaacggcatcggcggcagcggtgattttgaacgcaacgcgtatctgtcgatctttatggccccgtcgattgctaaagaaggcaagatctcaaccgtcgtgccaatgtgcagccatgttgatcacagcgaacacagcgtcaaagtgatcatcaccgaacaagggatcgccgatctgcgcggtctttccccgcttcaacgcgcccgcactatcattgataattgtgcacatcctatgtatcgggattatctgcatcgctatctggaaaatgcgcctggcggacatattcaccacgatcttagccacgtcttcgacttacaccgtaatttaattgcaaccggctcgatgctgggttaa

SEQ ID NO: 184 - DNA, 5638 bp, Artificial Sequence
  Synthetic
agttgttcttattggtggtgttgctttatggttgcatcgtagtaaatggttgtaacaaaagcaatttttccggctgtctgtatacaaaaacgccgcaaagtttgagcgaagtcaataaactctctacccattcagggcaatatctctcttggatccaaagtgaactctagaaataattttgtttaactttaagaaggagatatacatatgtctaacgtgcaggagtggcaacagcttgccaacaaggaattgagccgtcgggagaaaactgtcgactcgctggttcatcaaaccgcggaagggatcgccatcaagccgctgtataccgaagccgatctcgataatctggaggtgacaggtacccttcctggtttgccgccctacgttcgtggcccgcgtgccactatgtataccgcccaaccgtggaccatccgtcagtatgctggtttttcaacagcaaaagagtccaacgctttttatcgccgtaacctggccgccgggcaaaaaggtctttccgttgcgtttgaccttgccacccaccgtggctacgactccgataacccgcgcgtggcgggcgacgtcggcaaagcgggcgtcgctatcgacaccgtggaagatatgaaagtcctgttcgaccagatcccgctggataaaatgtcggtttcgatgaccatgaatggcgcagtgctaccagtactggcgttttatatcgtcgccgcagaagagcaaggtgttacacctgataaactgaccggcaccattcaaaacgatattctcaaagagtacctctgccgcaacacctatatttacccaccaaaaccgtcaatgcgcattatcgccgacatcatcgcctggtgttccggcaacatgccgcgatttaataccatcagtatcagcggttaccacatgggtgaagcgggtgccaactgcgtgcagcaggtagcatttacgctcgctgatgggattgagtacatcaaagcagcaatctctgccggactgaaaattgatgacttcgctcctcgcctgtcgttcttcttcggcatcggcatggatctgtttatgaacgtcgccatgttgcgtgcggcacgttatttatggagcgaagcggtcagtggatttggcgcacaggacccgaaatcactggcgctgcgtacccactgccagacctcaggctggagcctgactgaacaggatccgtataacaacgttatccgcaccaccattgaagcgctggctgcgacgctgggcggtactcagtcactgcataccaacgcctttgacgaagcgcttggtttgcctaccgatttctcagcacgcattgcccgcaacacccagatcatcatccaggaagaatcagaactctgccgcaccgtcgatccactggccggatcctattacattgagtcgctgaccgatcaaatcgtcaaacaagccagagctattatccaacagatcgacgaagccggtggcatggcgaaagcgatcgaagcaggtctgccaaaacgaatgatcgaagaggcctcagcgcgcgaacagtcgctgatcgaccagggcaagcgtgtcatcgttggtgtcaacaagtacaaactggatcacgaagacgaaaccgatgtacttgagatcgacaacgtgatggtgcgtaacgagcaaattgcttcgctggaacgcattcgcgccacccgtgatgatgccgccgtaaccgccgcgttgaacgccctgactcacgccgcacagcataacgaaaacctgctggctgccgctgttaatgccgctcgcgttcgcgccaccctgggtgaaatttccgatgcgctggaagtcgctttcgaccgttatctggtgccaagccagtgtgttaccggcgtgattgcgcaaagctatcatcagtctgagaaatcggcctccgagttcgatgccattgttgcgcaaacggagcagttccttgccgacaatggtcgtcgcccgcgcattctgatcgctaagatgggccaggatggacacgatcgcggcgcgaaagtgatcgccagcgcctattccgatctcggtttcgacgtagatttaagcccgatgttctctacacctgaagagatcgcccgcctggccgtagaaaacgacgttcacgtagtgggcgcatcctcactggctgccggtcataaaacgctgatcccggaactggtcgaagcgctgaaaaaatggggacgcgaagatatctgcgtggtcgcgggtggcgtcattccgccgcaggattacgccttcctgcaagagcgcggcgtggcggcgatttatggtccaggtacacctatgctcgacagtgtgcgcgacgtactgaatctgataagccagcatcatgattaatgaagccacgctggcagaaagtattcgccgcttacgtcagggtgagcgtgccacactcgcccaggccatgacgctggtggaaagccgtcacccgcgtcatcaggcactaagtacgcagctgcttgatgccattatgccgtactgcggtaacaccctgcgactgggcgttaccggcacccccggcgcggggaaaagtacctttcttgaggcctttggcatgttgttgattcgagagggattaaaggtcgcggttattgcggtcgatcccagcagcccggtcactggcggtagcattctcggggataaaacccgcatgaatgacctggcgcgtgccgaagcggcgtttattcgcccggtaccatcctccggtcatctgggcggtgccagtcagcgagcgcgggaattaatgctgttatgcgaagcagcgggttatgacgtagtgattgtcgaaacggttggcgtcgggcagtcggaaacagaagtcgcccgcatggtggactgttttatctcgttgcaaattgccggtggcggcgatgatctgcagggcattaaaaaagggctgatggaagtggctgatctgatcgttatcaacaaagacgatggcgataaccataccaatgtcgccattgcccggcatatgtacgagagtgccctgcatattctgcgacgtaaatacgacgaatggcagccacgggttctgacttgtagcgcactggaaaaacgtggaatcgatgagatctggcacgccatcatcgacttcaaaaccgcgctaactgccagtggtcgtttacaacaagtgcggcaacaacaatcggtggaatggctgcgtaagcagaccgaagaagaagtactgaatcacctgttcgcgaatgaagatttcgatcgctattaccgccagacgcttttagcggtcaaaaacaatacgctctcaccgcgcaccggcctgcggcagctcagtgaatttatccagacgcaatattttgattaaaggaatttttatgtcttatcagtatgttaacgttgtcactatcaacaaagtggcggtcattgagtttaactatggccgaaaacttaatgccttaagtaaagtctttattgatgatcttatgcaggcgttaagcgatctcaaccggccggaaattcgctgtatcattttgcgcgcaccgagtggatccaaagtcttctccgcaggtcacgatattcacgaactgccgtctggcggtcgcgatccgctctcctatgatgatccattgcgtcaaatcacccgcatgatccaaaaattcccgaaaccgatcatttcgatggtggaaggtagtgtttggggtggcgcatttgaaatgatcatgagttccgatctgatcatcgccgccagtacctcaaccttctcaatgacgcctgtaaacctcggcgtcccgtataacctggtcggcattcacaacctgacccgcgacgcgggcttccacattgtcaaagagctgatttttaccgcttcgccaatcaccgcccagcgcgcgctggctgtcggcatcctcaaccatgttgtggaagtggaagaactggaagatttcaccttacaaatggcgcaccacatctctgagaaagcgccgttagccattgccgttatcaaagaagagctgcgtgtactgggcgaagcacacaccatgaactccgatgaatttgaacgtattcaggggatgcgccgcgcggtgtatgacagcgaagattaccaggaagggatgaacgctttcctcgaaaaacgtaaacctaatttcgttggtcattaatccctgcgaacgaaggagtaaaaatggaaactcagtggacaaggatgaccgccaatgaagcggcagaaattatccagcataacgacatggtggcatttagcggctttaccccggcgggttcgccgaaagccctacccaccgcgattgcccgcagagctaacgaacagcatgaggccaaaaagccgtatcaaattcgccttctgacgggtgcgtcaatcagcgccgccgctgacgatgtactttctgacgccgatgctgtttcctggcgtgcgccatatcaaacatcgtccggtttacgtaaaaagatcaatcagggcgcggtgagtttcgttgacctgcatttgagcgaagtggcgcaaatggtcaattacggtttcttcggcgacattgatgttgccgtcattgaagcatcggcactggcaccggatggtcgagtctggttaaccagcgggatcggtaatgcgccgacctggctgctgcgggcgaagaaagtgatcattgaactcaatcactatcacgatccgcgcgttgcagaactggcggatattgtgattcctggcgcgccaccgcggcgcaatagcgtgtcgatcttccatgcaatggatcgcgtcggtacccgctatgtgcaaatcgatccgaaaaagattgtcgccgtcgtggaaaccaacttgcccgacgccggtaatatgctggataagcaaaatcccatgtgccagcagattgccgataacgtggtcacgttcttattgcaggaaatggcgcatgggcgtattccgccggaatttctgccgctgcaaagtggcgtgggcaatatcaataatgcggtaatggcgcgtctgggggaaaacccggtaattcctccgtttatgatgtattcggaagtgctacaggaatcggtggtgcatttactggaaaccggcaaaatcagcggggccagcgcctccagcctgacaatctcggccgattccctgcgcaagatttacgacaatatggattactttgccagccgcattgtgttgcgtccgcaggagatttccaataacccggaaatcatccgtcgtctgggcgtcatcgctctgaacgtcggcctggagtttgatatttacgggcatgccaactcaacacacgtagccggggtcgatctgatgaacggcatcggcggcagcggtgattttgaacgcaacgcgtatctgtcgatctttatggccccgtcgattgctaaagaaggcaagatctcaaccgtcgtgccaatgtgcagccatgttgatcacagcgaacacagcgtcaaagtgatcatcaccgaacaagggatcgccgatctgcgcggtctttccccgcttcaacgcgcccgcactatcattgataattgtgcacatcctatgtatcgggattatctgcatcgctatctggaaaatgcgcctggcggacatattcaccacgatcttagccacgtcttcgacttacaccgtaatttaattgcaaccggctcgatgctgggttaa

SEQ ID NO: 185 - DNA, 8698 bp, Artificial Sequence
  Synthetic
ttaagacccactttcacatttaagttgtttttctaatccgcatatgatcaattcaaggccgaataagaaggctggctctgcaccttggtgatcaaataattcgatagcttgtcgtaataatggcggcatactatcagtagtaggtgtttccctttcttctttagcgacttgatgctcttgatcttccaatacgcaacctaaagtaaaatgccccacagcgctgagtgcatataatgcattctctagtgaaaaaccttgttggcataaaaaggctaattgattttcgagagtttcatactgtttttctgtaggccgtgtacctaaatgtacttttgctccatcgcgatgacttagtaaagcacatctaaaacttttagcgttattacgtaaaaaatcttgccagctttccccttctaaagggcaaaagtgagtatggtgcctatctaacatctcaatggctaaggcgtcgagcaaagcccgcttattttttacatgccaatacaatgtaggctgctctacacctagcttctgggcgagtttacgggttgttaaaccttcgattccgacctcattaagcagctctaatgcgctgttaatcactttacttttatctaatctagacatcattaattcctaatttttgttgacactctatcattgatagagttattttaccactccctatcagtgatagagaaaagtgaactctagaaataattttgtttaactttaagaaggagatatacatatgcgcaaagtgccgattatcacggctgacgaggccgcaaaactgatcaaggacggcgacaccgtgacaactagcggctttgtgggtaacgcgatccctgaggcccttgaccgtgcagtcgaaaagcgtttcctggaaacgggcgaaccgaagaacattacttatgtatattgcggcagtcagggcaatcgcgacggtcgtggcgcagaacatttcgcgcatgaaggcctgctgaaacgttatatcgctggccattgggcgaccgtcccggcgttagggaaaatggccatggagaataaaatggaggcctacaatgtctctcagggcgccttgtgtcatctctttcgcgatattgcgagccataaaccgggtgtgttcacgaaagtaggaatcggcaccttcattgatccacgtaacggtggtgggaaggtcaacgatattaccaaggaagatatcgtagaactggtggaaattaaagggcaggaatacctgttttatccggcgttcccgatccatgtcgcgctgattcgtggcacctatgcggacgagagtggtaacatcacctttgaaaaagaggtagcgcctttggaagggacttctgtctgtcaagcggtgaagaactcgggtggcattgtcgtggttcaggttgagcgtgtcgtcaaagcaggcacgctggatccgcgccatgtgaaagttccgggtatctatgtagattacgtagtcgtcgcggatccggaggaccatcaacagtcccttgactgcgaatatgatcctgcccttagtggagagcaccgtcgtccggaggtggtgggtgaaccactgcctttatccgcgaagaaagtcatcggccgccgtggcgcgattgagctcgagaaagacgttgcagtgaaccttggggtaggtgcacctgagtatgtggcctccgtggccgatgaagaaggcattgtggattttatgactctcacagcggagtccggcgctatcggtggcgttccagccggcggtgttcgctttggggcgagctacaatgctgacgccttgatcgaccagggctaccaatttgattattacgacggtgggggtctggatctttgttacctgggtttagctgaatgcgacgaaaagggtaatatcaatgttagccgcttcggtcctcgtatcgctgggtgcggcggattcattaacattacccaaaacacgccgaaagtcttcttttgtgggacctttacagccggggggctgaaagtgaaaattgaagatggtaaggtgattatcgttcaggaagggaaacagaagaaattccttaaggcagtggagcaaatcacctttaatggagacgtggccttagcgaacaagcaacaagttacctacatcacggagcgttgcgtcttcctcctcaaagaagacggtttacacctttcggaaatcgcgccaggcatcgatctgcagacccagattttggatgttatggactttgccccgatcattgatcgtgacgcaaacgggcagattaaactgatggacgcggcgttattcgcagaagggctgatgggcttgaaagaaatgaagtcttgataagaaggagatatacatatgagcttaacccaaggcatgaaagctaaacaactgttagcatactttcagggtaaagccgatcaggatgcacgtgaagcgaaagcccgcggtgagctggtctgctggtcggcgtcagtcgcgccgccggaattttgcgtaacaatgggcattgccatgatctacccggagactcatgcagcgggcatcggtgcccgcaaaggtgcgatggacatgctggaagttgcggaccgcaaaggctacaacgtggattgttgttcctacggccgtgtaaatatgggttacatggaatgtttaaaagaagccgccatcacgggcgtcaagccggaagttttggttaattcccctgctgctgacgttccgcttcccgatttggtgattacgtgtaataatatctgtaacacgctgctgaaatggtacgaaaacttagcagcagaactcgatattccttgcatcgtgatcgacgtaccgtttaatcataccatgccgattccggaatatgccaaggcctacatcgcggaccagttccgcaatgcaatttctcagctggaagttatttgtggccgtccgttcgattggaagaaatttaaggaggtcaaagatcagacccagcgtagcgtataccactggaaccgcattgccgagatggcgaaatacaagcctagcccgctgaacggcttcgatctgttcaattacatggcgttaatcgtggcgtgccgcagcctggattatgcagaaattacctttaaagcgttcgcggacgaattagaagagaatttgaaggcgggtatctacgcctttaaaggtgcggaaaaaacgcgctttcaatgggaaggtatcgcggtgtggccacatttaggtcacacgtttaaatctatgaagaatctgaattcgattatgaccggtacggcataccccgccctttgggacctgcactatgacgctaacgacgaatctatgcactctatggctgaagcgtacacccgtatttatattaatacttgtctgcagaacaaagtagaggtcctgcttgggatcatggaaaaaggccaggtggatggtaccgtatatcatctgaatcgcagctgcaaactgatgagtttcctgaacgtggaaacggctgaaattattaaagagaagaacggtcttccttacgtctccattgatggcgatcagaccgatcctcgcgttttttctccggcccagtttgatacccgtgttcaggccctggttgagatgatggaggccaatatggcggcagcggaataataagaaggagatatacatatgtcacgcgtggaggcaatcctgtcgcagctgaaagatgtcgccgcgaatccgaaaaaagccatggatgactataaagctgaaacaggtaagggcgcggttggtatcatgccgatctacagccccgaagaaatggtacacgccgctggctatttgccgatgggaatctggggcgcccagggcaaaacgattagtaaagcgcgcacctatctgcctgcttttgcctgcagcgtaatgcagcaggttatggaattacagtgcgagggcgcgtatgatgacctgtccgcagttatttttagcgtaccgtgcgacactctcaaatgtcttagccagaaatggaaaggtacgtccccagtgattgtatttacgcatccgcagaaccgcggattagaagcggcgaaccaattcttggttaccgagtatgaactggtaaaagcacaactggaatcagttctgggtgtgaaaatttcaaacgccgccctggaaaattcgattgcaatttataacgagaatcgtgccgtgatgcgtgagttcgtgaaagtggcagcggactatcctcaagtcattgacgcagtgagccgccacgcggtttttaaagcgcgccagtttatgcttaaggaaaaacataccgcacttgtgaaagaactgatcgctgagattaaagcaacgccagtccagccgtgggacggaaaaaaggttgtagtgacgggcattctgttggaaccgaatgagttattagatatctttaatgagtttaagatcgcgattgttgatgatgatttagcgcaggaaagccgtcagatccgtgttgacgttctggacggagaaggcggaccgctctaccgtatggctaaagcgtggcagcaaatgtatggctgctcgctggcaaccgacaccaagaagggtcgcggccgtatgttaattaacaaaacgattcagaccggtgcggacgctatcgtagttgcaatgatgaagttttgcgacccagaagaatgggattatccggtaatgtaccgtgaatttgaagaaaaaggggtcaaatcacttatgattgaggtggatcaggaagtatcgtctttcgaacagattaaaacccgtctgcagtcattcgtcgaaatgctttaataagaaggagatatacatatgtataccttggggattgatgtcggttctgcctctagtaaagcggtgattctgaaagatggaaaagatattgtcgctgccgaggttgtccaagtcggtaccggctcctcgggtccccaacgcgcactggacaaagcctttgaagtctctggcttaaaaaaggaagacatcagctacacagtagctacgggctatgggcgcttcaattttagcgacgcggataaacagatttcggaaattagctgtcatgccaaaggcatttatttcttagtaccaactgcgcgcactattattgacattggcggccaagatgcgaaagccatccgcctggacgacaaggggggtattaagcaattcttcatgaatgataaatgcgcggcgggcacggggcgtttcctggaagtcatggctcgcgtacttgaaaccaccctggatgaaatggctgaactggatgaacaggcgactgacaccgctcccatttcaagcacctgcacggttttcgccgaaagcgaagtaattagccaattgagcaatggtgtctcacgcaacaacatcattaaaggtgtccatctgagcgttgcgtcacgtgcgtgtggtctggcgtatcgcggcggtttggagaaagatgttgttatgacaggtggcgtggcaaaaaatgcaggggtggtgcgcgcggtggcgggcgttctgaagaccgatgttatcgttgctccgaatcctcagacgaccggtgcactgggggcagcgctgtatgcttatgaggccgcccagaagaagtaataagaaggagatatacatatggccttcaatagcgcagatattaattctttccgcgatatttgggtgttttgtgaacagcgtgagggcaaactgattaacaccgatttcgaattaattagcgaaggtcgtaaactggctgacgaacgcggaagcaaactggttggaattttgctggggcacgaagttgaagaaatcgcaaaagaattaggcggctatggtgcggacaaggtaattgtgtgcgatcatccggaacttaaattttacactacggatgcttatgccaaagttttatgtgacgtcgtgatggaagagaaaccggaggtaattttgatcggtgccaccaacattggccgtgatctcggaccgcgttgtgctgcacgcttgcacacggggctgacggctgattgcacgcacctggatattgatatgaataaatatgtggactttcttagcaccagtagcaccttggatatctcgtcgatgactttccctatggaagatacaaaccttaaaatgacgcgccctgcatttggcggacatctgatggcaacgatcatttgtccacgcttccgtccctgtatgagcacagtgcgccccggagtgatgaagaaagcggagttctcgcaggagatggcgcaagcatgtcaagtagtgacccgtcacgtaaatttgtcggatgaagaccttaaaactaaagtaattaatatcgtgaaggaaacgaaaaagattgtggatctgatcggcgcagaaattattgtgtcagttggtcgtggtatctcgaaagatgtccaaggtggaattgcactggctgaaaaacttgcggacgcatttggtaacggtgtcgtgggcggctcgcgcgcagtgattgattccggctggttacctgcggatcatcaggttggacaaaccggtaagaccgtgcacccgaaagtctacgtggcgctgggtattagtggggctatccagcataaggctgggatgcaagactctgaactgatcattgccgtcaacaaagacgaaacggcgcctatcttcgactgcgccgattatggcatcaccggtgatttatttaaaatcgtaccgatgatgatcgacgcgatcaaagagggtaaaaacgcatgataagaaggagatatacatatgcgcatctatgtgtgtgtgaaacaagtcccagatacgagcggcaaggtggccgttaaccctgatgggacccttaaccgtgcctcaatggcagcgattattaacccggacgatatgtccgcgatcgaacaggcattaaaactgaaagatgaaaccggatgccaggttacggcgcttacgatgggtcctcctcctgccgagggcatgttgcgcgaaattattgcaatgggggccgacgatggtgtgctgatttcggcccgtgaatttggggggtccgataccttcgcaaccagtcaaattattagcgcggcaatccataaattaggcttaagcaatgaagacatgatcttttgcggtcgtcaggccattgacggtgatacggcccaagtcggccctcaaattgccgaaaaactgagcatcccacaggtaacctatggcgcaggaatcaaaaaatctggtgatttagtgctggtgaagcgtatgttggaggatggttatatgatgatcgaagtcgaaactccatgtctgattacctgcattcaggataaagcggtaaaaccacgttacatgactctcaacggtattatggaatgctactccaagccgctcctcgttctcgattacgaagcactgaaagatgaaccgctgatcgaacttgataccattgggcttaaaggctccccgacgaatatctttaaatcgtttacgccgcctcagaaaggcgttggtgtcatgctccaaggcaccgataaggaaaaagtcgaggatctggtggataagctgatgcagaaacatgtcatctaataagaaggagatatacatatgttcttactgaagattaaaaaagaacgtatgaaacgcatggactttagtttaacgcgtgaacaggagatgttaaaaaaactggcgcgtcagtttgctgagatcgagctggaaccggtggccgaagagattgatcgtgagcacgtttttcctgcagaaaactttaagaagatggcggaaattggcttaaccggcattggtatcccgaaagaatttggtggctccggtggaggcaccctggagaaggtcattgccgtgtcagaattcggcaaaaagtgtatggcctcagcttccattttaagcattcatcttatcgcgccgcaggcaatctacaaatatgggaccaaagaacagaaagagacgtacctgccgcgtcttaccaaaggtggtgaactgggcgcctttgcgctgacagaaccaaacgccggaagcgatgccggcgcggtaaaaacgaccgcgattctggacagccagacaaacgagtacgtgctgaatggcaccaaatgctttatcagcgggggcgggcgcgcgggtgttcttgtaatttttgcgcttactgaaccgaaaaaaggtctgaaagggatgagcgcgattatcgtggagaaagggaccccgggcttcagcatcggcaaggtggagagcaagatggggatcgcaggttcggaaaccgcggaacttatcttcgaagattgtcgcgttccggctgccaaccttttaggtaaagaaggcaaaggctttaaaattgctatggaagccctggatggcgcccgtattggcgtgggcgctcaagcaatcggaattgccgagggggcgatcgacctgagtgtgaagtacgttcacgagcgcattcaatttggtaaaccgatcgcgaatctgcagggaattcaatggtatatcgcggatatggcgaccaaaaccgccgcggcacgcgcacttgttgagtttgcagcgtatcttgaagacgcgggtaaaccgttcacaaaggaatctgctatgtgcaagctgaacgcctccgaaaacgcgcgttttgtgacaaatttagctctgcagattcacgggggttacggttatatgaaagattatccgttagagcgtatgtatcgcgatgctaagattacggaaatttacgaggggacatcagaaatccataaggtggtgattgcgcgtgaagtaatgaaacgctaa

SEQ ID NO: 186 - DNA, 7950 bp, Artificial Sequence
  Synthetic
atgcgcaaagtgccgattatcacggctgacgaggccgcaaaactgatcaaggacggcgacaccgtgacaactagcggctttgtgggtaacgcgatccctgaggcccttgaccgtgcagtcgaaaagcgtttcctggaaacgggcgaaccgaagaacattacttatgtatattgcggcagtcagggcaatcgcgacggtcgtggcgcagaacatttcgcgcatgaaggcctgctgaaacgttatatcgctggccattgggcgaccgtcccggcgttagggaaaatggccatggagaataaaatggaggcctacaatgtctctcagggcgccttgtgtcatctctttcgcgatattgcgagccataaaccgggtgtgttcacgaaagtaggaatcggcaccttcattgatccacgtaacggtggtgggaaggtcaacgatattaccaaggaagatatcgtagaactggtggaaattaaagggcaggaatacctgttttatccggcgttcccgatccatgtcgcgctgattcgtggcacctatgcggacgagagtggtaacatcacctttgaaaaagaggtagcgcctttggaagggacttctgtctgtcaagcggtgaagaactcgggtggcattgtcgtggttcaggttgagcgtgtcgtcaaagcaggcacgctggatccgcgccatgtgaaagttccgggtatctatgtagattacgtagtcgtcgcggatccggaggaccatcaacagtcccttgactgcgaatatgatcctgcccttagtggagagcaccgtcgtccggaggtggtgggtgaaccactgcctttatccgcgaagaaagtcatcggccgccgtggcgcgattgagctcgagaaagacgttgcagtgaaccttggggtaggtgcacctgagtatgtggcctccgtggccgatgaagaaggcattgtggattttatgactctcacagcggagtccggcgctatcggtggcgttccagccggcggtgttcgctttggggcgagctacaatgctgacgccttgatcgaccagggctaccaatttgattattacgacggtgggggtctggatctttgttacctgggtttagctgaatgcgacgaaaagggtaatatcaatgttagccgcttcggtcctcgtatcgctgggtgcggcggattcattaacattacccaaaacacgccgaaagtcttcttttgtgggacctttacagccggggggctgaaagtgaaaattgaagatggtaaggtgattatcgttcaggaagggaaacagaagaaattccttaaggcagtggagcaaatcacctttaatggagacgtggccttagcgaacaagcaacaagttacctacatcacggagcgttgcgtcttcctcctcaaagaagacggtttacacctttcggaaatcgcgccaggcatcgatctgcagacccagattttggatgttatggactttgccccgatcattgatcgtgacgcaaacgggcagattaaactgatggacgcggcgttattcgcagaagggctgatgggcttgaaagaaatgaagtcttgataagaaggagatatacatatgagcttaacccaaggcatgaaagctaaacaactgttagcatactttcagggtaaagccgatcaggatgcacgtgaagcgaaagcccgcggtgagctggtctgctggtcggcgtcagtcgcgccgccggaattttgcgtaacaatgggcattgccatgatctacccggagactcatgcagcgggcatcggtgcccgcaaaggtgcgatggacatgctggaagttgcggaccgcaaaggctacaacgtggattgttgttcctacggccgtgtaaatatgggttacatggaatgtttaaaagaagccgccatcacgggcgtcaagccggaagttttggttaattcccctgctgctgacgttccgcttcccgatttggtgattacgtgtaataatatctgtaacacgctgctgaaatggtacgaaaacttagcagcagaactcgatattccttgcatcgtgatcgacgtaccgtttaatcataccatgccgattccggaatatgccaaggcctacatcgcggaccagttccgcaatgcaatttctcagctggaagttatttgtggccgtccgttcgattggaagaaatttaaggaggtcaaagatcagacccagcgtagcgtataccactggaaccgcattgccgagatggcgaaatacaagcctagcccgctgaacggcttcgatctgttcaattacatggcgttaatcgtggcgtgccgcagcctggattatgcagaaattacctttaaagcgttcgcggacgaattagaagagaatttgaaggcgggtatctacgcctttaaaggtgcggaaaaaacgcgctttcaatgggaaggtatcgcggtgtggccacatttaggtcacacgtttaaatctatgaagaatctgaattcgattatgaccggtacggcataccccgccctttgggacctgcactatgacgctaacgacgaatctatgcactctatggctgaagcgtacacccgtatttatattaatacttgtctgcagaacaaagtagaggtcctgcttgggatcatggaaaaaggccaggtggatggtaccgtatatcatctgaatcgcagctgcaaactgatgagtttcctgaacgtggaaacggctgaaattattaaagagaagaacggtcttccttacgtctccattgatggcgatcagaccgatcctcgcgttttttctccggcccagtttgatacccgtgttcaggccctggttgagatgatggaggccaatatggcggcagcggaataataagaaggagatatacatatgtcacgcgtggaggcaatcctgtcgcagctgaaagatgtcgccgcgaatccgaaaaaagccatggatgactataaagctgaaacaggtaagggcgcggttggtatcatgccgatctacagccccgaagaaatggtacacgccgctggctatttgccgatgggaatctggggcgcccagggcaaaacgattagtaaagcgcgcacctatctgcctgcttttgcctgcagcgtaatgcagcaggttatggaattacagtgcgagggcgcgtatgatgacctgtccgcagttatttttagcgtaccgtgcgacactctcaaatgtcttagccagaaatggaaaggtacgtccccagtgattgtatttacgcatccgcagaaccgcggattagaagcggcgaaccaattcttggttaccgagtatgaactggtaaaagcacaactggaatcagttctgggtgtgaaaatttcaaacgccgccctggaaaattcgattgcaatttataacgagaatcgtgccgtgatgcgtgagttcgtgaaagtggcagcggactatcctcaagtcattgacgcagtgagccgccacgcggtttttaaagcgcgccagtttatgcttaaggaaaaacataccgcacttgtgaaagaactgatcgctgagattaaagcaacgccagtccagccgtgggacggaaaaaaggttgtagtgacgggcattctgttggaaccgaatgagttattagatatctttaatgagtttaagatcgcgattgttgatgatgatttagcgcaggaaagccgtcagatccgtgttgacgttctggacggagaaggcggaccgctctaccgtatggctaaagcgtggcagcaaatgtatggctgctcgctggcaaccgacaccaagaagggtcgcggccgtatgttaattaacaaaacgattcagaccggtgcggacgctatcgtagttgcaatgatgaagttttgcgacccagaagaatgggattatccggtaatgtaccgtgaatttgaagaaaaaggggtcaaatcacttatgattgaggtggatcaggaagtatcgtctttcgaacagattaaaacccgtctgcagtcattcgtcgaaatgctttaataagaaggagatatacatatgtataccttggggattgatgtcggttctgcctctagtaaagcggtgattctgaaagatggaaaagatattgtcgctgccgaggttgtccaagtcggtaccggctcctcgggtccccaacgcgcactggacaaagcctttgaagtctctggcttaaaaaaggaagacatcagctacacagtagctacgggctatgggcgcttcaattttagcgacgcggataaacagatttcggaaattagctgtcatgccaaaggcatttatttcttagtaccaactgcgcgcactattattgacattggcggccaagatgcgaaagccatccgcctggacgacaaggggggtattaagcaattcttcatgaatgataaatgcgcggcgggcacggggcgtttcctggaagtcatggctcgcgtacttgaaaccaccctggatgaaatggctgaactggatgaacaggcgactgacaccgctcccatttcaagcacctgcacggttttcgccgaaagcgaagtaattagccaattgagcaatggtgtctcacgcaacaacatcattaaaggtgtccatctgagcgttgcgtcacgtgcgtgtggtctggcgtatcgcggcggtttggagaaagatgttgttatgacaggtggcgtggcaaaaaatgcaggggtggtgcgcgcggtggcgggcgttctgaagaccgatgttatcgttgctccgaatcctcagacgaccggtgcactgggggcagcgctgtatgcttatgaggccgcccagaagaagtaataagaaggagatatacatatggccttcaatagcgcagatattaattctttccgcgatatttgggtgttttgtgaacagcgtgagggcaaactgattaacaccgatttcgaattaattagcgaaggtcgtaaactggctgacgaacgcggaagcaaactggttggaattttgctggggcacgaagttgaagaaatcgcaaaagaattaggcggctatggtgcggacaaggtaattgtgtgcgatcatccggaacttaaattttacactacggatgcttatgccaaagttttatgtgacgtcgtgatggaagagaaaccggaggtaattttgatcggtgccaccaacattggccgtgatctcggaccgcgttgtgctgcacgcttgcacacggggctgacggctgattgcacgcacctggatattgatatgaataaatatgtggactttcttagcaccagtagcaccttggatatctcgtcgatgactttccctatggaagatacaaaccttaaaatgacgcgccctgcatttggcggacatctgatggcaacgatcatttgtccacgcttccgtccctgtatgagcacagtgcgccccggagtgatgaagaaagcggagttctcgcaggagatggcgcaagcatgtcaagtagtgacccgtcacgtaaatttgtcggatgaagaccttaaaactaaagtaattaatatcgtgaaggaaacgaaaaagattgtggatctgatcggcgcagaaattattgtgtcagttggtcgtggtatctcgaaagatgtccaaggtggaattgcactggctgaaaaacttgcggacgcatttggtaacggtgtcgtgggcggctcgcgcgcagtgattgattccggctggttacctgcggatcatcaggttggacaaaccggtaagaccgtgcacccgaaagtctacgtggcgctgggtattagtggggctatccagcataaggctgggatgcaagactctgaactgatcattgccgtcaacaaagacgaaacggcgcctatcttcgactgcgccgattatggcatcaccggtgatttatttaaaatcgtaccgatgatgatcgacgcgatcaaagagggtaaaaacgcatgataagaaggagatatacatatgcgcatctatgtgtgtgtgaaacaagtcccagatacgagcggcaaggtggccgttaaccctgatgggacccttaaccgtgcctcaatggcagcgattattaacccggacgatatgtccgcgatcgaacaggcattaaaactgaaagatgaaaccggatgccaggttacggcgcttacgatgggtcctcctcctgccgagggcatgttgcgcgaaattattgcaatgggggccgacgatggtgtgctgatttcggcccgtgaatttggggggtccgataccttcgcaaccagtcaaattattagcgcggcaatccataaattaggcttaagcaatgaagacatgatcttttgcggtcgtcaggccattgacggtgatacggcccaagtcggccctcaaattgccgaaaaactgagcatcccacaggtaacctatggcgcaggaatcaaaaaatctggtgatttagtgctggtgaagcgtatgttggaggatggttatatgatgatcgaagtcgaaactccatgtctgattacctgcattcaggataaagcggtaaaaccacgttacatgactctcaacggtattatggaatgctactccaagccgctcctcgttctcgattacgaagcactgaaagatgaaccgctgatcgaacttgataccattgggcttaaaggctccccgacgaatatctttaaatcgtttacgccgcctcagaaaggcgttggtgtcatgctccaaggcaccgataaggaaaaagtcgaggatctggtggataagctgatgcagaaacatgtcatctaataagaaggagatatacatatgttcttactgaagattaaaaaagaacgtatgaaacgcatggactttagtttaacgcgtgaacaggagatgttaaaaaaactggcgcgtcagtttgctgagatcgagctggaaccggtggccgaagagattgatcgtgagcacgtttttcctgcagaaaactttaagaagatggcggaaattggcttaaccggcattggtatcccgaaagaatttggtggctccggtggaggcaccctggagaaggtcattgccgtgtcagaattcggcaaaaagtgtatggcctcagcttccattttaagcattcatcttatcgcgccgcaggcaatctacaaatatgggaccaaagaacagaaagagacgtacctgccgcgtcttaccaaaggtggtgaactgggcgcctttgcgctgacagaaccaaacgccggaagcgatgccggcgcggtaaaaacgaccgcgattctggacagccagacaaacgagtacgtgctgaatggcaccaaatgctttatcagcgggggcgggcgcgcgggtgttcttgtaatttttgcgcttactgaaccgaaaaaaggtctgaaagggatgagcgcgattatcgtggagaaagggaccccgggcttcagcatcggcaaggtggagagcaagatggggatcgcaggttcggaaaccgcggaacttatcttcgaagattgtcgcgttccggctgccaaccttttaggtaaagaaggcaaaggctttaaaattgctatggaagccctggatggcgcccgtattggcgtgggcgctcaagcaatcggaattgccgagggggcgatcgacctgagtgtgaagtacgttcacgagcgcattcaatttggtaaaccgatcgcgaatctgcagggaattcaatggtatatcgcggatatggcgaccaaaaccgccgcggcacgcgcacttgttgagtttgcagcgtatcttgaagacgcgggtaaaccgttcacaaaggaatctgctatgtgcaagctgaacgcctccgaaaacgcgcgttttgtgacaaatttagctctgcagattcacgggggttacggttatatgaaagattatccgttagagcgtatgtatcgcgatgctaagattacggaaatttacgaggggacatcagaaatccataaggtggtgattgcgcgtgaagtaatgaaacgctaa

SEQ ID NO: 187 - DNA, 7012 bp, Artificial Sequence
  Synthetic
caactgttgggaagggcgatcggtgcgggcctcttcgctattacgccagctggcgaaagggggatgtgctgcaaggcgattaagttgggtaacgccagggttttcccagtcacgacgttgtaaaacgacggccagtgaattgacgcgtattgggatgtaaaacgacggccagtgaattcgttaagacccactttcacatttaagttgtttttctaatccgcatatgatcaattcaaggccgaataagaaggctggctctgcaccttggtgatcaaataattcgatagcttgtcgtaataatggcggcatactatcagtagtaggtgtttccctttcttctttagcgacttgatgctcttgatcttccaatacgcaacctaaagtaaaatgccccacagcgctgagtgcatataatgcattctctagtgaaaaaccttgttggcataaaaaggctaattgattttcgagagtttcatactgtttttctgtaggccgtgtacctaaatgtacttttgctccatcgcgatgacttagtaaagcacatctaaaacttttagcgttattacgtaaaaaatcttgccagctttccccttctaaagggcaaaagtgagtatggtgcctatctaacatctcaatggctaaggcgtcgagcaaagcccgcttattttttacatgccaatacaatgtaggctgctctacacctagcttctgggcgagtttacgggttgttaaaccttcgattccgacctcattaagcagctctaatgcgctgttaatcactttacttttatctaatctagacatcattaattcctaatttttgttgacactctatcattgatagagttattttaccactccctatcagtgatagagaaaagtgaactctagaaataattttgtttaactttaagaaggagatatacatatgcgtgcggtactgatcgagaagtccgatgatacacagtccgtctctgtcaccgaactggctgaagatcaactgccggaaggcgacgttttggtagatgttgcttattcaacactgaactacaaagacgccctggcaattaccggtaaagcccccgtcgttcgtcgttttccgatggtacctggaatcgactttacgggtaccgtggcccagtcttcccacgccgacttcaagccaggtgatcgcgtaatcctgaatggttggggtgtgggggaaaaacattggggcggtttagcggagcgcgctcgcgtgcgcggagactggcttgttcccttgccagcccccctggacttacgccaagcggccatgatcggtacagcaggatacacggcgatgttgtgcgttctggcgcttgaacgtcacggagtggtgccgggtaatggggaaatcgtggtgtccggtgcagcaggcggcgtcggctccgttgcgacgacccttcttgccgctaagggctatgaggtagcggcagtgactggacgtgcgtccgaagcagaatatctgcgcggtttgggggcggcgagcgtaattgatcgtaacgaattaacggggaaggtacgcccgctgggtcaggagcgttgggctggcgggattgacgtggcgggatcaaccgtgcttgcgaacatgctttctatgatgaagtatcgcggggtagtcgctgcgtgtggcctggccgcgggcatggatctgcccgcgtctgtcgcgccctttattcttcgtgggatgacgctggcaggggtggatagcgttatgtgcccaaagacagatcgtttagcagcgtgggcccgtttggcgtcagatcttgaccctgccaagctggaggagatgactacagagttgccgtttagtgaagtaatcgagacagcacccaaattcttggacgggacggttcgtggccgcattgttatccccgtaacgccctaagaactctagaaataattttgtttaactttaagaaggagatatacatatgcgcaaagtgccgattatcacggctgacgaggccgcaaaactgatcaaggacggcgacaccgtgacaactagcggctttgtgggtaacgcgatccctgaggcccttgaccgtgcagtcgaaaagcgtttcctggaaacgggcgaaccgaagaacattacttatgtatattgcggcagtcagggcaatcgcgacggtcgtggcgcagaacatttcgcgcatgaaggcctgctgaaacgttatatcgctggccattgggcgaccgtcccggcgttagggaaaatggccatggagaataaaatggaggcctacaatgtctctcagggcgccttgtgtcatctctttcgcgatattgcgagccataaaccgggtgtgttcacgaaagtaggaatcggcaccttcattgatccacgtaacggtggtgggaaggtcaacgatattaccaaggaagatatcgtagaactggtggaaattaaagggcaggaatacctgttttatccggcgttcccgatccatgtcgcgctgattcgtggcacctatgcggacgagagtggtaacatcacctttgaaaaagaggtagcgcctttggaagggacttctgtctgtcaagcggtgaagaactcgggtggcattgtcgtggttcaggttgagcgtgtcgtcaaagcaggcacgctggatccgcgccatgtgaaagttccgggtatctatgtagattacgtagtcgtcgcggatccggaggaccatcaacagtcccttgactgcgaatatgatcctgcccttagtggagagcaccgtcgtccggaggtggtgggtgaaccactgcctttatccgcgaagaaagtcatcggccgccgtggcgcgattgagctcgagaaagacgttgcagtgaaccttggggtaggtgcacctgagtatgtggcctccgtggccgatgaagaaggcattgtggattttatgactctcacagcggagtccggcgctatcggtggcgttccagccggcggtgttcgctttggggcgagctacaatgctgacgccttgatcgaccagggctaccaatttgattattacgacggtgggggtctggatctttgttacctgggtttagctgaatgcgacgaaaagggtaatatcaatgttagccgcttcggtcctcgtatcgctgggtgcggcggattcattaacattacccaaaacacgccgaaagtcttcttttgtgggacctttacagccggggggctgaaagtgaaaattgaagatggtaaggtgattatcgttcaggaagggaaacagaagaaattccttaaggcagtggagcaaatcacctttaatggagacgtggccttagcgaacaagcaacaagttacctacatcacggagcgttgcgtcttcctcctcaaagaagacggtttacacctttcggaaatcgcgccaggcatcgatctgcagacccagattttggatgttatggactttgccccgatcattgatcgtgacgcaaacgggcagattaaactgatggacgcggcgttattcgcagaagggctgatgggcttgaaagaaatgaagtcttgataagaaggagatatacatatgagcttaacccaaggcatgaaagctaaacaactgttagcatactttcagggtaaagccgatcaggatgcacgtgaagcgaaagcccgcggtgagctggtctgctggtcggcgtcagtcgcgccgccggaattttgcgtaacaatgggcattgccatgatctacccggagactcatgcagcgggcatcggtgcccgcaaaggtgcgatggacatgctggaagttgcggaccgcaaaggctacaacgtggattgttgttcctacggccgtgtaaatatgggttacatggaatgtttaaaagaagccgccatcacgggcgtcaagccggaagttttggttaattcccctgctgctgacgttccgcttcccgatttggtgattacgtgtaataatatctgtaacacgctgctgaaatggtacgaaaacttagcagcagaactcgatattccttgcatcgtgatcgacgtaccgtttaatcataccatgccgattccggaatatgccaaggcctacatcgcggaccagttccgcaatgcaatttctcagctggaagttatttgtggccgtccgttcgattggaagaaatttaaggaggtcaaagatcagacccagcgtagcgtataccactggaaccgcattgccgagatggcgaaatacaagcctagcccgctgaacggcttcgatctgttcaattacatggcgttaatcgtggcgtgccgcagcctggattatgcagaaattacctttaaagcgttcgcggacgaattagaagagaatttgaaggcgggtatctacgcctttaaaggtgcggaaaaaacgcgctttcaatgggaaggtatcgcggtgtggccacatttaggtcacacgtttaaatctatgaagaatctgaattcgattatgaccggtacggcataccccgccctttgggacctgcactatgacgctaacgacgaatctatgcactctatggctgaagcgtacacccgtatttatattaatacttgtctgcagaacaaagtagaggtcctgcttgggatcatggaaaaaggccaggtggatggtaccgtatatcatctgaatcgcagctgcaaactgatgagtttcctgaacgtggaaacggctgaaattattaaagagaagaacggtcttccttacgtctccattgatggcgatcagaccgatcctcgcgttttttctccggcccagtttgatacccgtgttcaggccctggttgagatgatggaggccaatatggcggcagcggaataataagaaggagatatacatatgtcacgcgtggaggcaatcctgtcgcagctgaaagatgtcgccgcgaatccgaaaaaagccatggatgactataaagctgaaacaggtaagggcgcggttggtatcatgccgatctacagccccgaagaaatggtacacgccgctggctatttgccgatgggaatctggggcgcccagggcaaaacgattagtaaagcgcgcacctatctgcctgcttttgcctgcagcgtaatgcagcaggttatggaattacagtgcgagggcgcgtatgatgacctgtccgcagttatttttagcgtaccgtgcgacactctcaaatgtcttagccagaaatggaaaggtacgtccccagtgattgtatttacgcatccgcagaaccgcggattagaagcggcgaaccaattcttggttaccgagtatgaactggtaaaagcacaactggaatcagttctgggtgtgaaaatttcaaacgccgccctggaaaattcgattgcaatttataacgagaatcgtgccgtgatgcgtgagttcgtgaaagtggcagcggactatcctcaagtcattgacgcagtgagccgccacgcggtttttaaagcgcgccagtttatgcttaaggaaaaacataccgcacttgtgaaagaactgatcgctgagattaaagcaacgccagtccagccgtgggacggaaaaaaggttgtagtgacgggcattctgttggaaccgaatgagttattagatatctttaatgagtttaagatcgcgattgttgatgatgatttagcgcaggaaagccgtcggatccgtgttgacgttctggacggagaaggcggaccgctctaccgtatggctaaagcgtggcagcaaatgtatggctgctcgctggcaaccgacaccaagaagggtcgcggccgtatgttaattaacaaaacgattcagaccggtgcggacgctatcgtagttgcaatgatgaagttttgcgacccagaagaatgggattatccggtaatgtaccgtgaatttgaagaaaaaggggtcaaatcacttatgattgaggtggatcaggaagtatcgtctttcgaacagattaaaacccgtctgcagtcattcgtcgaaatgctttaataagaaggagatatacatatgtataccttggggattgatgtcggttctgcctctagtaaagcggtgattctgaaagatggaaaagatattgtcgctgccgaggttgtccaagtcggtaccggctcctcgggtccccaacgcgcactggacaaagcctttgaagtctctggcttaaaaaaggaagacatcagctacacagtagctacgggctatgggcgcttcaattttagcgacgcggataaacagatttcggaaattagctgtcatgccaaaggcatttatttcttagtaccaactgcgcgcactattattgacattggcggccaagatgcgaaagccatccgcctggacgacaaggggggtattaagcaattcttcatgaatgataaatgcgcggcgggcacggggcgtttcctggaagtcatggctcgcgtacttgaaaccaccctggatgaaatggctgaactggatgaacaggcgactgacaccgctcccatttcaagcacctgcacggttttcgccgaaagcgaagtaattagccaattgagcaatggtgtctcacgcaacaacatcattaaaggtgtccatctgagcgttgcgtcacgtgcgtgtggtctggcgtatcgcggcggtttggagaaagatgttgttatgacaggtggcgtggcaaaaaatgcaggggtggtgcgcgcggtggcgggcgttctgaagaccgatgttatcgttgctccgaatcctcagacgaccggtgcactgggggcagcgctgtatgcttatgaggccgcccagaagaagtagatggtagtgtggggtctccccatgcgagagtagggaactgccaggcatcaaataaaacgaaaggctcagtcgaaagactgggcctttcgttttatctgttgtttgtcggtgaacgctctcctgagtaggacaaatccgccgggagcggatttgaacgttgcgaagcaacggcccggagggtggcgggcaggacgcccgccataaactgccaggcatcaaattaagcagaaggccatcctgacggatggcctttt

SEQ ID NO: 188 - DNA, 5829 bp, Artificial Sequence
  Synthetic
atgcgtgcggtactgatcgagaagtccgatgatacacagtccgtctctgtcaccgaactggctgaagatcaactgccggaaggcgacgttttggtagatgttgcttattcaacactgaactacaaagacgccctggcaattaccggtaaagcccccgtcgttcgtcgttttccgatggtacctggaatcgactttacgggtaccgtggcccagtcttcccacgccgacttcaagccaggtgatcgcgtaatcctgaatggttggggtgtgggggaaaaacattggggcggtttagcggagcgcgctcgcgtgcgcggagactggcttgttcccttgccagcccccctggacttacgccaagcggccatgatcggtacagcaggatacacggcgatgttgtgcgttctggcgcttgaacgtcacggagtggtgccgggtaatggggaaatcgtggtgtccggtgcagcaggcggcgtcggctccgttgcgacgacccttcttgccgctaagggctatgaggtagcggcagtgactggacgtgcgtccgaagcagaatatctgcgcggtttgggggcggcgagcgtaattgatcgtaacgaattaacggggaaggtacgcccgctgggtcaggagcgttgggctggcgggattgacgtggcgggatcaaccgtgcttgcgaacatgctttctatgatgaagtatcgcggggtagtcgctgcgtgtggcctggccgcgggcatggatctgcccgcgtctgtcgcgccctttattcttcgtgggatgacgctggcaggggtggatagcgttatgtgcccaaagacagatcgtttagcagcgtgggcccgtttggcgtcagatcttgaccctgccaagctggaggagatgactacagagttgccgtttagtgaagtaatcgagacagcacccaaattcttggacgggacggttcgtggccgcattgttatccccgtaacgccctaagaactctagaaataattttgtttaactttaagaaggagatatacatatgcgcaaagtgccgattatcacggctgacgaggccgcaaaactgatcaaggacggcgacaccgtgacaactagcggctttgtgggtaacgcgatccctgaggcccttgaccgtgcagtcgaaaagcgtttcctggaaacgggcgaaccgaagaacattacttatgtatattgcggcagtcagggcaatcgcgacggtcgtggcgcagaacatttcgcgcatgaaggcctgctgaaacgttatatcgctggccattgggcgaccgtcccggcgttagggaaaatggccatggagaataaaatggaggcctacaatgtctctcagggcgccttgtgtcatctctttcgcgatattgcgagccataaaccgggtgtgttcacgaaagtaggaatcggcaccttcattgatccacgtaacggtggtgggaaggtcaacgatattaccaaggaagatatcgtagaactggtggaaattaaagggcaggaatacctgttttatccggcgttcccgatccatgtcgcgctgattcgtggcacctatgcggacgagagtggtaacatcacctttgaaaaagaggtagcgcctttggaagggacttctgtctgtcaagcggtgaagaactcgggtggcattgtcgtggttcaggttgagcgtgtcgtcaaagcaggcacgctggatccgcgccatgtgaaagttccgggtatctatgtagattacgtagtcgtcgcggatccggaggaccatcaacagtcccttgactgcgaatatgatcctgcccttagtggagagcaccgtcgtccggaggtggtgggtgaaccactgcctttatccgcgaagaaagtcatcggccgccgtggcgcgattgagctcgagaaagacgttgcagtgaaccttggggtaggtgcacctgagtatgtggcctccgtggccgatgaagaaggcattgtggattttatgactctcacagcggagtccggcgctatcggtggcgttccagccggcggtgttcgctttggggcgagctacaatgctgacgccttgatcgaccagggctaccaatttgattattacgacggtgggggtctggatctttgttacctgggtttagctgaatgcgacgaaaagggtaatatcaatgttagccgcttcggtcctcgtatcgctgggtgcggcggattcattaacattacccaaaacacgccgaaagtcttcttttgtgggacctttacagccggggggctgaaagtgaaaattgaagatggtaaggtgattatcgttcaggaagggaaacagaagaaattccttaaggcagtggagcaaatcacctttaatggagacgtggccttagcgaacaagcaacaagttacctacatcacggagcgttgcgtcttcctcctcaaagaagacggtttacacctttcggaaatcgcgccaggcatcgatctgcagacccagattttggatgttatggactttgccccgatcattgatcgtgacgcaaacgggcagattaaactgatggacgcggcgttattcgcagaagggctgatgggcttgaaagaaatgaagtcttgataagaaggagatatacatatgagcttaacccaaggcatgaaagctaaacaactgttagcatactttcagggtaaagccgatcaggatgcacgtgaagcgaaagcccgcggtgagctggtctgctggtcggcgtcagtcgcgccgccggaattttgcgtaacaatgggcattgccatgatctacccggagactcatgcagcgggcatcggtgcccgcaaaggtgcgatggacatgctggaagttgcggaccgcaaaggctacaacgtggattgttgttcctacggccgtgtaaatatgggttacatggaatgtttaaaagaagccgccatcacgggcgtcaagccggaagttttggttaattcccctgctgctgacgttccgcttcccgatttggtgattacgtgtaataatatctgtaacacgctgctgaaatggtacgaaaacttagcagcagaactcgatattccttgcatcgtgatcgacgtaccgtttaatcataccatgccgattccggaatatgccaaggcctacatcgcggaccagttccgcaatgcaatttctcagctggaagttatttgtggccgtccgttcgattggaagaaatttaaggaggtcaaagatcagacccagcgtagcgtataccactggaaccgcattgccgagatggcgaaatacaagcctagcccgctgaacggcttcgatctgttcaattacatggcgttaatcgtggcgtgccgcagcctggattatgcagaaattacctttaaagcgttcgcggacgaattagaagagaatttgaaggcgggtatctacgcctttaaaggtgcggaaaaaacgcgctttcaatgggaaggtatcgcggtgtggccacatttaggtcacacgtttaaatctatgaagaatctgaattcgattatgaccggtacggcataccccgccctttgggacctgcactatgacgctaacgacgaatctatgcactctatggctgaagcgtacacccgtatttatattaatacttgtctgcagaacaaagtagaggtcctgcttgggatcatggaaaaaggccaggtggatggtaccgtatatcatctgaatcgcagctgcaaactgatgagtttcctgaacgtggaaacggctgaaattattaaagagaagaacggtcttccttacgtctccattgatggcgatcagaccgatcctcgcgttttttctccggcccagtttgatacccgtgttcaggccctggttgagatgatggaggccaatatggcggcagcggaataataagaaggagatatacatatgtcacgcgtggaggcaatcctgtcgcagctgaaagatgtcgccgcgaatccgaaaaaagccatggatgactataaagctgaaacaggtaagggcgcggttggtatcatgccgatctacagccccgaagaaatggtacacgccgctggctatttgccgatgggaatctggggcgcccagggcaaaacgattagtaaagcgcgcacctatctgcctgcttttgcctgcagcgtaatgcagcaggttatggaattacagtgcgagggcgcgtatgatgacctgtccgcagttatttttagcgtaccgtgcgacactctcaaatgtcttagccagaaatggaaaggtacgtccccagtgattgtatttacgcatccgcagaaccgcggattagaagcggcgaaccaattcttggttaccgagtatgaactggtaaaagcacaactggaatcagttctgggtgtgaaaatttcaaacgccgccctggaaaattcgattgcaatttataacgagaatcgtgccgtgatgcgtgagttcgtgaaagtggcagcggactatcctcaagtcattgacgcagtgagccgccacgcggtttttaaagcgcgccagtttatgcttaaggaaaaacataccgcacttgtgaaagaactgatcgctgagattaaagcaacgccagtccagccgtgggacggaaaaaaggttgtagtgacgggcattctgttggaaccgaatgagttattagatatctttaatgagtttaagatcgcgattgttgatgatgatttagcgcaggaaagccgtcggatccgtgttgacgttctggacggagaaggcggaccgctctaccgtatggctaaagcgtggcagcaaatgtatggctgctcgctggcaaccgacaccaagaagggtcgcggccgtatgttaattaacaaaacgattcagaccggtgcggacgctatcgtagttgcaatgatgaagttttgcgacccagaagaatgggattatccggtaatgtaccgtgaatttgaagaaaaaggggtcaaatcacttatgattgaggtggatcaggaagtatcgtctttcgaacagattaaaacccgtctgcagtcattcgtcgaaatgctttaataagaaggagatatacatatgtataccttggggattgatgtcggttctgcctctagtaaagcggtgattctgaaagatggaaaagatattgtcgctgccgaggttgtccaagtcggtaccggctcctcgggtccccaacgcgcactggacaaagcctttgaagtctctggcttaaaaaaggaagacatcagctacacagtagctacgggctatgggcgcttcaattttagcgacgcggataaacagatttcggaaattagctgtcatgccaaaggcatttatttcttagtaccaactgcgcgcactattattgacattggcggccaagatgcgaaagccatccgcctggacgacaaggggggtattaagcaattcttcatgaatgataaatgcgcggcgggcacggggcgtttcctggaagtcatggctcgcgtacttgaaaccaccctggatgaaatggctgaactggatgaacaggcgactgacaccgctcccatttcaagcacctgcacggttttcgccgaaagcgaagtaattagccaattgagcaatggtgtctcacgcaacaacatcattaaaggtgtccatctgagcgttgcgtcacgtgcgtgtggtctggcgtatcgcggcggtttggagaaagatgttgttatgacaggtggcgtggcaaaaaatgcaggggtggtgcgcgcggtggcgggcgttctgaagaccgatgttatcgttgctccgaatcctcagacgaccggtgcactgggggcagcgctgtatgcttatgaggccgcccagaagaagta

SEQ ID NO: 189 - DNA, 99 bp, Artificial Sequence
  Synthetic
catgctgatggttctttctctgatgagatgaacaccattcttgataatcttgccgccagggactttataaactggttgattcagaccaaaatcactgac

SEQ ID NO: 190 - DNA, 102 bp, Artificial Sequence
  Synthetic
catgctgacggctctttttctgacgaaatgaataccatcctggataatctggcggcgcgtgattttattaattggctgatccaaactaaaattactgattaa

SEQ ID NO: 191 - DNA, 162 bp, Artificial Sequence
  Synthetic
atggcacaagtcattaataccaacagcctctcgctgatcactcaaaataatatcaacaagcatgctgacggctctttttctgacgaaatgaataccatcctggataatctggcggcgcgtgattttattaattggctgatccaaactaaaattactgattaa

SEQ ID NO: 192 - DNA, 105 bp, Artificial Sequence
  Synthetic
atgcatgctgacggctctttttctgacgaaatgaataccatcctggataatctggcggcgcgtgattttattaattggctgatccaaactaaaattactgattaa

SEQ ID NO: 193 - DNA, 450 bp, Artificial Sequence
  Synthetic
atgggtactgaccaatgtgataatttcccacaaatgctgcgtgatttgcgcgacgctttctcgcgtgtgaaaactttttttcagactaaagatgaggtggataatctgctgctgaaagagagcctgttggaagattttaaaggctacttgggctgtcaagcgctgtcggagatgattcaattttatctggaagaggtgatgccgcaagctgagaaccaagatccggaagcgaaagatcacgtgaattcgctgggcgagaatctgaaaactctgcgtctgcgtctgcgtcgttgtcaccgttttttgccgtgcgaaaacaaaagtaaagctgttgagcaaattaaaaacgcttttaacaaactgcaggaaaaaggtatctataaagcgatgagcgaatttgatatttttattaattatattgaagcttatatgactattaaagctcgctaa

SEQ ID NO: 194 - DNA, 444 bp, Artificial Sequence
  Synthetic
ggtacagaccaatgtgacaattttccccaaatgttgagggacctaagagatgccttcagtcgtgttaaaacctttttccagacaaaggacgaggtagataaccttttgctcaaggagtctctgctagaggactttaagggctaccttggatgccaggccctgtcagaaatgatccaattctacctggaggaagtcatgccacaggctgaaaaccaggaccctgaagccaaagaccatgtcaattctttgggtgaaaatctaaagaccctacggctccgcctgcgccgttgccacaggttcctgccgtgtgagaacaagagtaaagctgtggaacagataaaaaatgcctttaacaagctgcaggaaaaaggaatttacaaagccatgagtgaatttgacatttttattaactacatagaagcatacatgacaattaaagccagg

SEQ ID NO: 195 - DNA, 441 bp, Artificial Sequence
  Synthetic
gcaccgatctcttcccactgtcgcttagataaatcgaattttcaacaaccttatattacgaatcgtacgtttatgctggctaaagaagcgtcattagctgataacaacactgatgttcgcctgattggtgagaaattgtttcacggtgtgtctatgtcagaacgttgctacctgatgaaacaagttctgaatttcaccctggaagaagtgttgtttccgcaatctgaccgctttcaaccgtatatgcaagaggttgtgccgtttctggcgcgcctgagtaatcgcctgagcacttgtcatattgagggcgacgacctgcatattcaacgaaatgttcaaaaattgaaagatacggtgaagaaactgggtgaaagtggtgaaatcaaagcgattggtgagctggatctgctgtttatgtcattgcgcaatgcgtgcatttaa

SEQ ID NO: 196 - DNA, 444 bp, Artificial Sequence
  Synthetic
atggcaccgatctcttcccactgtcgcttagataaatcgaattttcaacaaccttatattacgaatcgtacgtttatgctggctaaagaagcgtcattagctgataacaacactgatgttcgcctgattggtgagaaattgtttcacggtgtgtctatgtcagaacgttgctacctgatgaaacaagttctgaatttcaccctggaagaagtgttgtttccgcaatctgaccgctttcaaccgtatatgcaagaggttgtgccgtttctggcgcgcctgagtaatcgcctgagcacttgtcatattgagggcgacgacctgcatattcaacgaaatgttcaaaaattgaaagatacggtgaagaaactgggtgaaagtggtgaaatcaaagcgattggtgagctggatctgctgtttatgtcattgcgcaatgcgtgcatttaa

SEQ ID NO: 197 - DNA, 483 bp, Artificial Sequence; identical to SEQ ID NO: 101
  Synthetic

SEQ ID NO: 198 - DNA, 501 bp, Artificial Sequence
  Synthetic
tcgccaggtcaaggaacgcagtcagagaattcatgcactcactttccgggcaatctgccgaatatgctgcgcgatctgcgagatgcattctctcgcgtgaaaacgttctttcaaatgaaagatcaactggataatctgctgctgaaggagtcgttgttggaggattttaaggggtatctgggttgtcaagcactgtctgaaatgattcaattttacttggaggaagttatgccgcaagcggaaaaccaagatccggatattaaggcgcacgtgaactcactgggcgaaaacctgaaaactttgcgcctgcgtctgagacgatgtcaccgattcctgccgtgtgaaaacggaggaggaagtggtggtaagtcaaaggcggttgagcaagttaagaatgctttcaataagctgcaagaaaagggcatctataaagcgatgtctgaatttgatatctttataaactacatagaagcttatatgactatgaagattcgaaattaa

SEQ ID NO: 199 - DNA, 138 bp, Artificial Sequence
  Synthetic
tgacggcgattgagccgacgggtggaaacccaaaacgtaatcaacgtgggtactccttaaattgggttcgaatggaccatggcacaagtcattaataccaacagcctctcgctgatcactcaaaataatatcaacaag

SEQ ID NO: 200 - DNA, 70 bp, Artificial Sequence
  Synthetic
tgacggcgattgagccgacgggtggaaacccaaaacgtaatcaactacgaacacttacaggaggtaccca

SEQ ID NO: 201 - DNA, 70 bp, Artificial Sequence
  Synthetic
tgacggcgattgagccgacgggtggaaacccaaaacgtaatcaactcaaatcccttaataaggaggtaaa

SEQ ID NO: 202 - DNA, 106 bp, Artificial Sequence
  Synthetic
ctctagaaataattttgtttaactttaagaaggagatatacatatgaaacaaagcactattgcactggcactcttaccgttactgtttacccctgtgacaaaagcg

SEQ ID NO: 203 - DNA, 63 bp, Artificial Sequence
  Synthetic
atgaaacaaagcactattgcactggcactcttaccgttactgtttacccctgtgacaaaagcg

SEQ ID NO: 204 - DNA, 109 bp, Artificial Sequence
  Synthetic
ctctagaaataattttgtttaactttaagaaggagatatacatatgatgaagcgcaatattctggcagtgatcgtccctgctctgttagtagcaggtactgcaaacgct

SEQ ID NO: 205 - DNA, 66 bp, Artificial Sequence
  Synthetic
atgatgaagcgcaatattctggcagtgatcgtccctgctctgttagtagcaggtactgcaaacgct

SEQ ID NO: 206 - DNA, 88 bp, Artificial Sequence
  Synthetic
ctctagaaataattttgtttaactttaagaaggagatatacatatgagaactctgactctaaatgaattagattctgtttctggtggt

SEQ ID NO: 207 - DNA, 45 bp, Artificial Sequence
  Synthetic
atgagaactctgactctaaatgaattagattctgtttctggtggt

SEQ ID NO: 208 - DNA, 88 bp, Artificial Sequence
  Synthetic
gacgccagagagttaagggggttaaatgaaacaatcgaccatcgcattggcgctgcttcctctattgttcacaccggtgacaaaggca

SEQ ID NO: 209 - DNA, 63 bp, Artificial Sequence
  Synthetic
atgaaacaatcgaccatcgcattggcgctgcttcctctattgttcacaccggtgacaaaggca

SEQ ID NO: 210 - DNA, 160 bp, Artificial Sequence
  Synthetic
ctctagaaataattttgtttaactttaagaaggagatatacatatgaacaataacgatctctttcaggcatcacgtcggcgttttctggcacaactcggcggcttaaccgtcgccgggatgctggggccgtcattgttaacgccgcgacgtgcgactgcg

SEQ ID NO: 211 - DNA, 117 bp, Artificial Sequence
  Synthetic
atgaacaataacgatctctttcaggcatcacgtcggcgttttctggcacaactcggcggcttaaccgtcgccgggatgctggggccgtcattgttaacgccgcgacgtgcgactgcg

SEQ ID NO: 212 - DNA, 148 bp, Artificial Sequence
  Synthetic
cccacattcgaggtactaaatgaacaataacgatctctttcaggcatcacgtcggcgttttctggcacaactcggcggcttaaccgtcgccgggatgctggggacgtcattgttaacgccgcgccgtgcgactgcggcgcaagcggcg

SEQ ID NO: 213 - DNA, 129 bp, Artificial Sequence
  Synthetic
atgaacaataacgatctctttcaggcatcacgtcggcgttttctggcacaactcggcggcttaaccgtcgccgggatgctggggacgtcattgttaacgccgcgccgtgcgactgcggcgcaagcggcg

SEQ ID NO: 214 - DNA, 130 bp, Artificial Sequence
  Synthetic
accctattacacacctaaggaggccaaatacatggacgtcagtcgcagacaattttttaaaatctgcgcgggcggtatggcgggaacaacagtagcagcattgggctttgccccgaagcaagcactggct

SEQ ID NO: 215 - DNA, 99 bp, Artificial Sequence
  Synthetic
atggacgtcagtcgcagacaattttttaaaatctgcgcgggcggtatggcgggaacaacagtagcagcattgggctttgccccgaagcaagcactggct

SEQ ID NO: 216 - DNA, 168 bp, Artificial Sequence
  Synthetic
tacgcaaaaaacataatttaagagaggataaacatgaaaacgaaaatccctgatgcggtattggctgctgaggtgagtcgccgtggtttggtaaaaacgacagcgatcggcggcctggcaatggccagcagcgcattaacattaccttttagtcggattgcgcacgct

SEQ ID NO: 217 - DNA, 135 bp, Artificial Sequence
  Synthetic
atgaaaacgaaaatccctgatgcggtattggctgctgaggtgagtcgccgtggtttggtaaaaacgacagcgatcggcggcctggcaatggccagcagcgcattaacattaccttttagtcggattgcgcacgct

SEQ ID NO: 218 - DNA, 712 bp, Artificial Sequence
  Synthetic
gaattcgttaagacccactttcacatttaagttgtttttctaatccgcatatgatcaattcaaggccgaataagaaggctggctctgcaccttggtgatcaaataattcgatagcttgtcgtaataatggcggcatactatcagtagtaggtgtttccctttcttctttagcgacttgatgctcttgatcttccaatacgcaacctaaagtaaaatgccccacagcgctgagtgcatataatgcattctctagtgaaaaaccttgttggcataaaaaggctaattgattttcgagagtttcatactgtttttctgtaggccgtgtacctaaatgtacttttgctccatcgcgatgacttagtaaagcacatctaaaacttttagcgttattacgtaaaaaatcttgccagctttccccttctaaagggcaaaagtgagtatggtgcctatctaacatctcaatggctaaggcgtcgagcaaagcccgcttattttttacatgccaatacaatgtaggctgctctacacctagcttctgggcgagtttacgggttgttaaaccttcgattccgacctcattaagcagctctaatgcgctgttaatcactttacttttatctaatctagacatcattaattcctaatttttgttgacactctatcattgatagagttattttaccactccctatcagtgatagagaaaagtgaa

SEQ ID NO: 219 - DNA, 104 bp, Artificial Sequence
  Synthetic
agcgggaataaggggcagagaaaagagtatttcgtcgactaacaaaaaatggctgtttgtgaaaaaaattctaaaggttgttttacgacagacgataacagggt

SEQ ID NO: 220 - DNA, 162 bp, Artificial Sequence
  Synthetic
ggtaccagttgttcttattggtggtgttgctttatggttgcatcgtagtaaatggttgtaacaaaagcaatttttccggctgtctgtatacaaaaacgccgcaaagtttgagcgaagtcaataaactctctacccattcagggcaatatctctcttggatcc

SEQ ID NO: 221 - DNA, 358 bp, Artificial Sequence
  Synthetic
cacatttccccgaaaagtgccgatggccccccgatggtagtgtggcccatgcgagagtagggaactgccaggcatcaaataaaacgaaaggctcagtcgaaagactgggcctttcgttttatctgttgtttgtcggtgaacgctctcctgagtaggacaaatccgccgggagcggatttgaacgttgcgaagcaacggcccggagggtggcgggcaggacgcccgccataaactgccaggcatcaaattaagcagaaggccatcctgacggatggcctttttgcgtggccagtgccaagcttgcatgcagattgcagcattacacgtcttgagcgattgtgtaggctggagctgcttc

SEQ ID NO: 222 - DNA, 48 bp, Artificial Sequence
  Synthetic
gaagttcctatactttctagagaataggaacttcggaataggaacttc

SEQ ID NO: 223 - DNA, 1345 bp, Artificial Sequence
  Synthetic
aagatcccctcacgctgccgcaagcactcagggcgcaagggctgctaaaggaagcggaacacgtagaaagccagtccgcagaaacggtgctgaccccggatgaatgtcagctactgggctatctggacaagggaaaacgcaagcgcaaagagaaagcaggtagcttgcagtgggcttacatggcgatagctagactgggcggttttatggacagcaagcgaaccggaattgccagctggggcgccctctggtaaggttgggaagccctgcaaagtaaactggatggctttcttgccgccaaggatctgatggcgcaggggatcaagatctgatcaagagacaggatgaggatcgtttcgcatgattgaacaagatggattgcacgcaggttctccggccgcttgggtggagaggctattcggctatgactgggcacaacagacaatcggctgctctgatgccgccgtgttccggctgtcagcgcaggggcgcccggttctttttgtcaagaccgacctgtccggtgccctgaatgaactgcaggacgaggcagcgcggctatcgtggctggccacgacgggcgttccttgcgcagctgtgctcgacgttgtcactgaagcgggaagggactggctgctattgggcgaagtgccggggcaggatctcctgtcatctcaccttgctcctgccgagaaagtatccatcatggctgatgcaatgcggcggctgcatacgcttgatccggctacctgcccattcgaccaccaagcgaaacatcgcatcgagcgagcacgtactcggatggaagccggtcttgtcgatcaggatgatctggacgaagagcatcaggggctcgcgccagccgaactgttcgccaggctcaaggcgcgcatgcccgacggcgaggatctcgtcgtgacccatggcgatgcctgcttgccgaatatcatggtggaaaatggccgcttttctggattcatcgactgtggccggctgggtgtggcggaccgctatcaggacatagcgttggctacccgtgatattgctgaagagcttggcggcgaatgggctgaccgcttcctcgtgctttacggtatcgccgctcccgattcgcagcgcatcgccttctatcgccttcttgacgagttcttctgagcgggactctggggttcgaaatgaccgaccaagcgacgcccaacctgccatcacgagatttcgattccaccgccgccttctatgaaaggttgggcttcggaatcgttttccgggacgccggctggatgatcctccagcgcggggatctcatgctggagttcttcgcccaccccagcttcaaaagcgctct

SEQ ID NO: 224 - DNA, 2388 bp, Artificial Sequence
  Synthetic
cgttccttgtagggcgtcatagcgttcgacggcattaagtaacccaatgccgcccgcctgtagcagatcgtcaagttccacgctcgcgggcagtcgaacctgcaggcgcaatgcttcgtgacgcaccagcgggacataacgctgccacagcgagtgtttatccattacaccttcagcggtatagagtgaattcacgataaacagccctgcgttatatgagttatcggcatgattatccgtttctgcagggtttttaatcggacgattagtgggtgaaatgaggggttatttgggggttaccggtaaattgcgggcagaaaaaaccccgccgttggcggggaagcacgttgctggcaaattaccattcatgttgccggatgcggcgtaaacgccttatccggcctacaaaaatgtgcaaattcaataaattgcaattccccttgtaggcctgataagcgcagcgcatcaggcaatttggcgttgccgtcagtctcagttaatcaggttacggcgattaatcagtaattttagtttggatcagccaattaataaaatcacgcgccgccagattatccaggatggtattcatttcgtcagaaaaagagccgtcagcatgcattaggaacctcccagagtttatacttgttgattacgttttgggtttccacccgtcggctcaatcgccgtcaaccctgttatcgtctgtcgtaaaacaacctttagaatttttttcacaaacagccattttttgttagtcgacgaaatactcttttctctgccccttattcccgctattaaaaaaaacaattaaacgtaaactttgcgcaattcaggccgataaccccggtattcgttttacgtgtcgaaagataaacgaagttcctatactttctagagaataggaacttcggaataggaacttcatttctcgttcgctgccacctaagaatactctacggtcacatacaaatggcgcgccttacgccccgccctgccactcatcgcagtactgttgtattcattaagcatctgccgacatggaagccatcacaaacggcatgatgaacctgaatcgccagcggcatcagcaccttgtcgccttgcgtataatatttgcccatggtgaaaacgggggcgaagaagttgtccatattggccacgtttaaatcaaaactggtgaaactcacccagggattggctgagacgaaaaacatattctcaataaaccctttagggaaataggccaggttttcaccgtaacacgccacatcttgcgaatatatgtgtagaaactgccggaaatcgtcgtggtattcactccagagcgatgaaaacgtttcagtttgctcatggaaaacggtgtaacaagggtgaacactatcccatatcaccagctcaccgtctttcattgccatacgtaattccggatgagcattcatcaggcgggcaagaatgtgaataaaggccggataaaacttgtgcttatttttctttacggtctttaaaaaggccgtaatatccagctgaacggtctggttataggtacattgagcaactgactgaaatgcctcaaaatgttctttacgatgccattgggatatatcaacggtggtatatccagtgatttttttctccattttagcttccttagctcctgaaaatctcgacaactcaaaaaatacgcccggtagtgatcttatttcattatggtgaaagttggaacctcttacgtgccgatcaacgtctcattttcgccaaaagttggcccagggcttcccggtatcaacagggacaccaggatttatttattctgcgaagtgatcttccgtcacaggtaggcgcgccgaagttcctatactttctagagaataggaacttcggaataggaactctcaccgccgcgcaaaaagcgacgctaacccctatttcaaatcagcaatcgtcgtttaccgctaaacttagcgcctacggtacgctgaaaagcgcgctgacgactttccagaccgccaatactgcattgtctaaagccgatcttttttccgctaccagcaccaccagcagcaccaccgcgttcagtgccaccaccgcgggtaatgccatcgccgggaaatacaccatcagcgtcacccatctggcgcaggcgcaaaccctgacaacgcgcaccaccagagacgatacgaaaacggcgatcgccaccagcgacagcaaactcaccattcaacaaggcggcgacaaagatccgatttccattgatatcagcgcggctaactcgtctttaagcgggatccgtgatgccatcaacaacgcaaaagcaggcgtaagcgcaagcatcattaacgtgggtaacggtgaatatcgtctgtcagtcacatcaaatgacaccggcct

SEQ ID NO: 225 - DNA, 176 bp, Artificial Sequence
  Synthetic
attaatcagtaattttagtttggatcagccaattaataaaatcacgcgccgccagattatccaggatggtattcatttcgtcagaaaaagagccgtcagcatgcattaggaacctcccagagtttatacttgttgattacgttttgggtttccacccgtcggctcaatcgccgtca

SEQ ID NO: 226 - DNA, 3118 bp, Artificial Sequence
  Synthetic
cgttccttgtagggcgtcatagcgttcgacggcattaagtaacccaatgccgcccgcctgtagcagatcgtcaagttccacgctcgcgggcagtcgaacctgcaggcgcaatgcttcgtgacgcaccagcgggacataacgctgccacagcgagtgtttatccattacaccttcagcggtatagagtgaattcacgataaacagccctgcgttatatgagttatcggcatgattatccgtttctgcagggtttttaatcggacgattagtgggtgaaatgaggggttatttgggggttaccggtaaattgcgggcagaaaaaaccccgccgttggcggggaagcacgttgctggcaaattaccattcatgttgccggatgcggcgtaaacgccttatccggcctacaaaaatgtgcaaattcaataaattgcaattccccttgtaggcctgataagcgcagcgcatcaggcaatttggcgttgccgtcagtctcagttaatcaggttacggcgattaatcagtaattttagtttggatcagccaattaataaaatcacgcgccgccagattatccaggatggtattcatttcgtcagaaaaagagccgtcagcatgcttgttgatattattttgagtgatcagcgagaggctgttggtattaatgacttgtgccatggtccattcgaacccaatttaaggagtacccacgttgattacgttttgggtttccacccgtcggctcaatcgccgtcattctctatcactgatagggagtggtaaaataactctatcaatgatagagtgtcaacaaaaattaggaattaatgatgtctagattagataaaagtaaagtgattaacagcgcattagagctgcttaatgaggtcggaatcgaaggtttaacaacccgtaaactcgcccagaagctaggtgtagagcagcctacattgtattggcatgtaaaaaataagcgggctttgctcgacgccttagccattgagatgttagataggcaccatactcacttttgccctttagaaggggaaagctggcaagattttttacgtaataacgctaaaagttttagatgtgctttactaagtcatcgcgatggagcaaaagtacatttaggtacacggcctacagaaaaacagtatgaaactctcgaaaatcaattagcctttttatgccaacaaggtttttcactagagaatgcattatatgcactcagcgctgtggggcattttactttaggttgcgtattggaagatcaagagcatcaagtcgctaaagaagaaagggaaacacctactactgatagtatgccgccattattacgacaagctatcgaattatttgatcaccaaggtgcagagccagccttcttattcggccttgaattgatcatatgcggattagaaaaacaacttaaatgtgaaagtgggtcttaagaatttttttcacaaacagccattttttgttagtcgacgaaatactcttttctctgccccttattcccgctattaaaaaaaacaattaaacgtaaactttgcgcaattcaggccgataaccccggtattcgttttacgtgtcgaaagataaacgaagttcctatactttctagagaataggaacttcggaataggaacttcatttctcgttcgctgccacctaagaatactctacggtcacatacaaatggcgcgccttacgccccgccctgccactcatcgcagtactgttgtattcattaagcatctgccgacatggaagccatcacaaacggcatgatgaacctgaatcgccagcggcatcagcaccttgtcgccttgcgtataatatttgcccatggtgaaaacgggggcgaagaagttgtccatattggccacgtttaaatcaaaactggtgaaactcacccagggattggctgagacgaaaaacatattctcaataaaccctttagggaaataggccaggttttcaccgtaacacgccacatcttgcgaatatatgtgtagaaactgccggaaatcgtcgtggtattcactccagagcgatgaaaacgtttcagtttgctcatggaaaacggtgtaacaagggtgaacactatcccatatcaccagctcaccgtctttcattgccatacgtaattccggatgagcattcatcaggcgggcaagaatgtgaataaaggccggataaaacttgtgcttatttttctttacggtctttaaaaaggccgtaatatccagctgaacggtctggttataggtacattgagcaactgactgaaatgcctcaaaatgttctttacgatgccattgggatatatcaacggtggtatatccagtgatttttttctccattttagcttccttagctcctgaaaatctcgacaactcaaaaaatacgcccggtagtgatcttatttcattatggtgaaagttggaacctcttacgtgccgatcaacgtctcattttcgccaaaagttggcccagggcttcccggtatcaacagggacaccaggatttatttattctgcgaagtgatcttccgtcacaggtaggcgcgccgaagttcctatactttctagagaataggaacttcggaataggaactctcaccgccgcgcaaaaagcgacgctaacccctatttcaaatcagcaatcgtcgtttaccgctaaacttagcgcctacggtacgctgaaaagcgcgctgacgactttccagaccgccaatactgcattgtctaaagccgatcttttttccgctaccagcaccaccagcagcaccaccgcgttcagtgccaccaccgcgggtaatgccatcgccgggaaatacaccatcagcgtcacccatctggcgcaggcgcaaaccctgacaacgcgcaccaccagagacgatacgaaaacggcgatcgccaccagcgacagcaaactcaccattcaacaaggcggcgacaaagatccgatttccattgatatcagcgcggctaactcgtctttaagcgggatccgtgatgccatcaacaacgcaaaagcaggcgtaagcgcaagcatcattaacgtgggtaacggtgaatatcgtctgtcagtcacatcaaatgacaccggcct

SEQ ID NO: 227 - DNA, 162 bp, Artificial Sequence
  Synthetic
ttaatcagtaattttagtttggatcagccaattaataaaatcacgcgccgccagattatccaggatggtattcatttcgtcagaaaaagagccgtcagcatgcttgttgatattattttgagtgatcagcgagaggctgttggtattaatgacttgtgccat

SEQ ID NO: 228 - DNA, 1326 bp, Artificial Sequence
  Synthetic
ttaagacccactttcacatttaagttgtttttctaatccgcatatgatcaattcaaggccgaataagaaggctggctctgcaccttggtgatcaaataattcgatagcttgtcgtaataatggcggcatactatcagtagtaggtgtttccctttcttctttagcgacttgatgctcttgatcttccaatacgcaacctaaagtaaaatgccccacagcgctgagtgcatataatgcattctctagtgaaaaaccttgttggcataaaaaggctaattgattttcgagagtttcatactgtttttctgtaggccgtgtacctaaatgtacttttgctccatcgcgatgacttagtaaagcacatctaaaacttttagcgttattacgtaaaaaatcttgccagctttccccttctaaagggcaaaagtgagtatggtgcctatctaacatctcaatggctaaggcgtcgagcaaagcccgcttattttttacatgccaatacaatgtaggctgctctacacctagcttctgggcgagtttacgggttgttaaaccttcgattccgacctcattaagcagctctaatgcgctgttaatcactttacttttatctaatctagacatcattaattcctaatttttgttgacactctatcattgatagagttattttaccactccctatcagtgatagagaaaagtgaactctagaaataattttgtttaactttaagaaggagatatacatatgatgaagcgcaatattctggcagtgatcgtccctgctctgttagtagcaggtactgcaaacgctcatgctgatggttctttctctgatgagatgaacaccattcttgataatcttgccgccagggactttataaactggttgattcagaccaaaatcactgacaggtgacacatttccccgaaaagtgccgatggccccccgatggtagtgtggccccatgcgagagtagggaactgccaggcatcaaataaaacgaaaggctcagtcgaaagactgggcctttcgttttatctgttgtttgtcggtgaacgctctcctgagtaggacaaatccgccgggagcggatttgaacgttgcgaagcaacggcccggagggtggcgggcaggacgcccgccataaactgccaggcatcaaattaagcagaaggccatcctgacggatggcctttttgcgtggccagtgccaagcttgcatgcagattgcagcattacacgtcttgagcgattgtgtaggctggagctgcttcgaagttcctatactttctagagaataggaacttcggaataggaacttc

SEQ ID NO: 229 - DNA, 171 bp, Artificial Sequence
  Synthetic
atgatgaagcgcaatattctggcagtgatcgtccctgctctgttagtagcaggtactgcaaacgctcatgctgatggttctttctctgatgagatgaacaccattcttgataatcttgccgccagggactttataaactggttgattcagaccaaaatcactgacaggtga

SEQ ID NO: 230 - DNA, 1375 bp, Artificial Sequence
  Synthetic
taagacccactttcacatttaagttgtttttctaatccgcatatgatcaattcaaggccgaataagaaggctggctctgcaccttggtgatcaaataattcgatagcttgtcgtaataatggcggcatactatcagtagtaggtgtttccctttcttctttagcgacttgatgctcttgatcttccaatacgcaacctaaagtaaaatgccccacagcgctgagtgcatataatgcattctctagtgaaaaaccttgttggcataaaaaggctaattgattttcgagagtttcatactgtttttctgtaggccgtgtacctaaatgtacttttgctccatcgcgatgacttagtaaagcacatctaaaacttttagcgttattacgtaaaaaatcttgccagctttccccttctaaagggcaaaagtgagtatggtgcctatctaacatctcaatggctaaggcgtcgagcaaagcccgcttattttttacatgccaatacaatgtaggctgctctacacctagcttctgggcgagtttacgggttgttaaaccttcgattccgacctcattaagcagctctaatgcgctgttaatcactttacttttatctaatctagacatcattaattcctaatttttgttgacactctatcattgatagagttattttaccactccctatcagtgatagagaaaagtgaactctagaaataattttgtttaactttaagaaggagatatacatatgaacaataacgatctctttcaggcatcacgtcggcgttttctggcacaactcggcggcttaaccgtcgccgggatgctggggccgtcattgttaacgccgcgacgtgcgactgcgcatgctgatggttctttctctgatgagatgaacaccattcttgataatcttgccgccagggactttataaactggttgattcagaccaaaatcactgactaataacacatttccccgaaaagtgccgatggccccccgatggtagtgtggcccatgcgagagtagggaactgccaggcatcaaataaaacgaaaggctcagtcgaaagactgggcctttcgttttatctgttgtttgtcggtgaacgctctcctgagtaggacaaatccgccgggagcggatttgaacgttgcgaagcaacggcccggagggtggcgggcaggacgcccgccataaactgccaggcatcaaattaagcagaaggccatcctgacggatggcctttttgcgtggccagtgccaagcttgcatgcagattgcagcattacacgtcttgagcgattgtgtaggctggagctgcttcgaagttcctatactttctagagaataggaacttcggaataggaacttc

SEQ ID NO: 231 - DNA, 216 bp, Artificial Sequence
  Synthetic
atgaacaataacgatctctttcaggcatcacgtcggcgttttctggcacaactcggcggcttaaccgtcgccgggatgctggggccgtcattgttaacgccgcgacgtgcgactgcgcatgctgatggttctttctctgatgagatgaacaccattcttgataatcttgccgccagggactttataaactggttgattcagaccaaaatcactgac

SEQ ID NO: 232 - DNA, 1283 bp, Artificial Sequence
  Synthetic
gaattcgttaagacccactttcacatttaagttgtttttctaatccgcatatgatcaattcaaggccgaataagaaggctggctctgcaccttggtgatcaaataattcgatagcttgtcgtaataatggcggcatactatcagtagtaggtgtttccctttcttctttagcgacttgatgctcttgatcttccaatacgcaacctaaagtaaaatgccccacagcgctgagtgcatataatgcattctctagtgaaaaaccttgttggcataaaaaggctaattgattttcgagagtttcatactgtttttctgtaggccgtgtacctaaatgtacttttgctccatcgcgatgacttagtaaagcacatctaaaacttttagcgttattacgtaaaaaatcttgccagctttccccttctaaagggcaaaagtgagtatggtgcctatctaacatctcaatggctaaggcgtcgagcaaagcccgcttattttttacatgccaatacaatgtaggctgctctacacctagcttctgggcgagtttacgggttgttaaaccttcgattccgacctcattaagcagctctaatgcgctgttaatcactttacttttatctaatctagacatcattaattcctaatttttgttgacactctatcattgatagagttattttaccactccctatcagtgatagagaaaagtgaagacgccagagagttaagggggttaaatgaaacaatcgaccatcgcattggcgctgcttcctctattgttcacaccggtgacaaaggcatcgccaggtcaaggaacgcagtcagagaattcatgcactcactttccgggcaatctgccgaatatgctgcgcgatctgcgagatgcattctctcgcgtgaaaacgttctttcaaatgaaagatcaactggataatctgctgctgaaggagtcgttgttggaggattttaaggggtatctgggttgtcaagcactgtctgaaatgattcaattttacttggaggaagttatgccgcaagcggaaaaccaagatccggatattaaggcgcacgtgaactcactgggcgaaaacctgaaaactttgcgcctgcgtctgagacgatgtcaccgattcctgccgtgtgaaaacaagtcaaaggcggttgagcaagttaagaatgctttcaataagctgcaagaaaagggcatctataaagcgatgtctgaatttgatatctttataaactacatagaagcttatatgactatgaagattcgaaattaa

SEQ ID NO: 233 - DNA, 571 bp, Artificial Sequence
  Synthetic
gacgccagagagttaagggggttaaatgaaacaatcgaccatcgcattggcgctgcttcctctattgttcacaccggtgacaaaggcatcgccaggtcaaggaacgcagtcagagaattcatgcactcactttccgggcaatctgccgaatatgctgcgcgatctgcgagatgcattctctcgcgtgaaaacgttctttcaaatgaaagatcaactggataatctgctgctgaaggagtcgttgttggaggattttaaggggtatctgggttgtcaagcactgtctgaaatgattcaattttacttggaggaagttatgccgcaagcggaaaaccaagatccggatattaaggcgcacgtgaactcactgggcgaaaacctgaaaactttgcgcctgcgtctgagacgatgtcaccgattcctgccgtgtgaaaacaagtcaaaggcggttgagcaagttaagaatgctttcaataagctgcaagaaaagggcatctataaagcgatgtctgaatttgatatctttataaactacatagaagcttatatgactatgaagattcgaaattaa

SEQ ID NO: 234 - DNA, 520 bp, Artificial Sequence
  Synthetic
tgacggcgattgagccgacgggtggaaacccaaaacgtaatcaactcaaatcccttaataaggaggtaaaatgggtactgaccaatgtgataatttcccacaaatgctgcgtgatttgcgcgacgctttctcgcgtgtgaaaactttttttcagactaaagatgaggtggataatctgctgctgaaagagagcctgttggaagattttaaaggctacttgggctgtcaagcgctgtcggagatgattcaattttatctggaagaggtgatgccgcaagctgagaaccaagatccggaagcgaaagatcacgtgaattcgctgggcgagaatctgaaaactctgcgtctgcgtctgcgtcgttgtcaccgttttttgccgtgcgaaaacaaaagtaaagctgttgagcaaattaaaaacgcttttaacaaactgcaggaaaaaggtatctataaagcgatgagcgaatttgatatttttattaattatattgaagcttatatgactattaaagctcgctaa

SEQ ID NO: 235 - DNA, 1244 bp, Artificial Sequence
  Synthetic
gaattcgttaagacccactttcacatttaagttgtttttctaatccgcatatgatcaattcaaggccgaataagaaggctggctctgcaccttggtgatcaaataattcgatagcttgtcgtaataatggcggcatactatcagtagtaggtgtttccctttcttctttagcgacttgatgctcttgatcttccaatacgcaacctaaagtaaaatgccccacagcgctgagtgcatataatgcattctctagtgaaaaaccttgttggcataaaaaggctaattgattttcgagagtttcatactgtttttctgtaggccgtgtacctaaatgtacttttgctccatcgcgatgacttagtaaagcacatctaaaacttttagcgttattacgtaaaaaatcttgccagctttccccttctaaagggcaaaagtgagtatggtgcctatctaacatctcaatggctaaggcgtcgagcaaagcccgcttattttttacatgccaatacaatgtaggctgctctacacctagcttctgggcgagtttacgggttgttaaaccttcgattccgacctcattaagcagctctaatgcgctgttaatcactttacttttatctaatctagacatcattaattcctaatttttgttgacactctatcattgatagagttattttaccactccctatcagtgatagagaaaagtgaagacgccagagagttaagggggttaaatgaaacaatcgaccatcgcattggcgctgcttcctctattgttcacaccggtgacaaaggcaggtacagaccaatgtgacaattttccccaaatgttgagggacctaagagatgccttcagtcgtgttaaaacctttttccagacaaaggacgaggtagataaccttttgctcaaggagtctctgctagaggactttaagggctaccttggatgccaggccctgtcagaaatgatccaattctacctggaggaagtcatgccacaggctgaaaaccaggaccctgaagccaaagaccatgtcaattctttgggtgaaaatctaaagaccctacggctccgcctgcgccgttgccacaggttcctgccgtgtgagaacaagagtaaagctgtggaacagataaaaaatgcctttaacaagctgcaggaaaaaggaatttacaaagccatgagtgaatttgacatttttattaactacatagaagcatacatgacaattaaagccagg

SEQ ID NO: 236 - DNA, 532 bp, Artificial Sequence
  Synthetic
gacgccagagagttaagggggttaaatgaaacaatcgaccatcgcattggcgctgcttcctctattgttcacaccggtgacaaaggcaggtacagaccaatgtgacaattttccccaaatgttgagggacctaagagatgccttcagtcgtgttaaaacctttttccagacaaaggacgaggtagataaccttttgctcaaggagtctctgctagaggactttaagggctaccttggatgccaggccctgtcagaaatgatccaattctacctggaggaagtcatgccacaggctgaaaaccaggaccctgaagccaaagaccatgtcaattctttgggtgaaaatctaaagaccctacggctccgcctgcgccgttgccacaggttcctgccgtgtgagaacaagagtaaagctgtggaacagataaaaaatgcctttaacaagctgcaggaaaaaggaatttacaaagccatgagtgaatttgacatttttattaactacatagaagcatacatgacaattaaagccagg

SEQ ID NO: 237 - DNA, 1241 bp, Artificial Sequence
  Synthetic
gaattcgttaagacccactttcacatttaagttgtttttctaatccgcatatgatcaattcaaggccgaataagaaggctggctctgcaccttggtgatcaaataattcgatagcttgtcgtaataatggcggcatactatcagtagtaggtgtttccctttcttctttagcgacttgatgctcttgatcttccaatacgcaacctaaagtaaaatgccccacagcgctgagtgcatataatgcattctctagtgaaaaaccttgttggcataaaaaggctaattgattttcgagagtttcatactgtttttctgtaggccgtgtacctaaatgtacttttgctccatcgcgatgacttagtaaagcacatctaaaacttttagcgttattacgtaaaaaatcttgccagctttccccttctaaagggcaaaagtgagtatggtgcctatctaacatctcaatggctaaggcgtcgagcaaagcccgcttattttttacatgccaatacaatgtaggctgctctacacctagcttctgggcgagtttacgggttgttaaaccttcgattccgacctcattaagcagctctaatgcgctgttaatcactttacttttatctaatctagacatcattaattcctaatttttgttgacactctatcattgatagagttattttaccactccctatcagtgatagagaaaagtgaagacgccagagagttaagggggttaaatgaaacaatcgaccatcgcattggcgctgcttcctctattgttcacaccggtgacaaaggcagcaccgatctcttcccactgtcgcttagataaatcgaattttcaacaaccttatattacgaatcgtacgtttatgctggctaaagaagcgtcattagctgataacaacactgatgttcgcctgattggtgagaaattgtttcacggtgtgtctatgtcagaacgttgctacctgatgaaacaagttctgaatttcaccctggaagaagtgttgtttccgcaatctgaccgctttcaaccgtatatgcaagaggttgtgccgtttctggcgcgcctgagtaatcgcctgagcacttgtcatattgagggcgacgacctgcatattcaacgaaatgttcaaaaattgaaagatacggtgaagaaactgggtgaaagtggtgaaatcaaagcgattggtgagctggatctgctgtttatgtcattgcgcaatgcgtgcatttaa

SEQ ID NO: 238 - DNA, 529 bp, Artificial Sequence
  Synthetic
gacgccagagagttaagggggttaaatgaaacaatcgaccatcgcattggcgctgcttcctctattgttcacaccggtgacaaaggcagcaccgatctcttcccactgtcgcttagataaatcgaattttcaacaaccttatattacgaatcgtacgtttatgctggctaaagaagcgtcattagctgataacaacactgatgttcgcctgattggtgagaaattgtttcacggtgtgtctatgtcagaacgttgctacctgatgaaacaagttctgaatttcaccctggaagaagtgttgtttccgcaatctgaccgctttcaaccgtatatgcaagaggttgtgccgtttctggcgcgcctgagtaatcgcctgagcacttgtcatattgagggcgacgacctgcatattcaacgaaatgttcaaaaattgaaagatacggtgaagaaactgggtgaaagtggtgaaatcaaagcgattggtgagctggatctgctgtttatgtcattgcgcaatgcgtgcatttaa

SEQ ID NO: 239 - DNA, 88 bp, Artificial Sequence; identical to SEQ ID NO: 208
  Synthetic

SEQ ID NO: 240 - DNA, 3383 bp, Artificial Sequence
  Synthetic
ggtaccgtcagcataacaccctgacctctcattaattgttcatgccgggcggcactatcgtcgtccggccttttcctctcttactctgctacgtacatctatttctataaatccgttcaatttgtctgttttttgcacaaacatgaaatatcagacaattccgtgacttaagaaaatttatacaaatcagcaatataccccttaaggagtatataaaggtgaatttgatttacatcaataagcggggttgctgaatcgttaaggtaggcggtaatagaaaagaaatcgaggcaaaaatgagcaaagtcagactcgcaattatggatcctctggccgtcgtattacaacgtcgtgactgggaaaaccctggcgttacccaacttaatcgccttgcggcacatccccctttcgccagctggcgtaatagcgaagaggcccgcaccgatcgcccttcccaacagttgcgcagcctgaatggcgaatggcgctttgcctggtttccggcaccagaagcggtgccggaaagctggctggagtgcgatcttcctgacgccgatactgtcgtcgtcccctcaaactggcagatgcacggttacgatgcgcctatctacaccaacgtgacctatcccattacggtcaatccgccgtttgttcccgcggagaatccgacaggttgttactcgctcacatttaatattgatgaaagctggctacaggaaggccagacgcgaattatttttgatggcgttaactcggcgtttcatctgtggtgcaacgggcgctgggtcggttacggccaggacagccgtttgccgtctgaatttgacctgagcgcatttttacgcgccggagaaaaccgcctcgcggtgatggtgctgcgctggagtgacggcagttatctggaagatcaggatatgtggcggatgagcggcattttccgtgacgtctcgttgctgcataaaccgaccacgcaaatcagcgatttccaagttaccactctctttaatgatgatttcagccgcgcggtactggaggcagaagttcagatgtacggcgagctgcgcgatgaactgcgggtgacggtttctttgtggcagggtgaaacgcaggtcgccagcggcaccgcgcctttcggcggtgaaattatcgatgagcgtggcggttatgccgatcgcgtcacactacgcctgaacgttgaaaatccggaactgtggagcgccgaaatcccgaatctctatcgtgcagtggttgaactgcacaccgccgacggcacgctgattgaagcagaagcctgcgacgtcggtttccgcgaggtgcggattgaaaatggtctgctgctgctgaacggcaagccgttgctgattcgcggcgttaaccgtcacgagcatcatcctctgcatggtcaggtcatggatgagcagacgatggtgcaggatatcctgctgatgaagcagaacaactttaacgccgtgcgctgttcgcattatccgaaccatccgctgtggtacacgctgtgcgaccgctacggcctgtatgtggtggatgaagccaatattgaaacccacggcatggtgccaatgaatcgtctgaccgatgatccgcgctggctacccgcgatgagcgaacgcgtaacgcggatggtgcagcgcgatcgtaatcacccgagtgtgatcatctggtcgctggggaatgaatcaggccacggcgctaatcacgacgcgctgtatcgctggatcaaatctgtcgatccttcccgcccggtacagtatgaaggcggcggagccgacaccacggccaccgatattatttgcccgatgtacgcgcgcgtggatgaagaccagcccttcccggcggtgccgaaatggtccatcaaaaaatggctttcgctgcctggagaaatgcgcccgctgatcctttgcgaatatgcccacgcgatgggtaacagtcttggcggcttcgctaaatactggcaggcgtttcgtcagtacccccgtttacagggcggcttcgtctgggactgggtggatcagtcgctgattaaatatgatgaaaacggcaacccgtggtcggcttacggcggtgattttggcgatacgccgaacgatcgccagttctgtatgaacggtctggtctttgccgaccgcacgccgcatccggcgctgacggaagcaaaacaccaacagcagtatttccagttccgtttatccgggcgaaccatcgaagtgaccagcgaatacctgttccgtcatagcgataacgagttcctgcactggatggtggcactggatggcaagccgctggcaagcggtgaagtgcctctggatgttggcccgcaaggtaagcagttgattgaactgcctgaactgccgcagccggagagcgccggacaactctggctaacggtacgcgtagtgcaaccaaacgcgaccgcatggtcagaagccggacacatcagcgcctggcagcaatggcgtctggcggaaaacctcagcgtgacactcccctccgcgtcccacgccatccctcaactgaccaccagcggaacggatttttgcatcgagctgggtaataagcgttggcaatttaaccgccagtcaggctttctttcacagatgtggattggcgatgaaaaacaactgctgaccccgctgcgcgatcagttcacccgtgcgccgctggataacgacattggcgtaagtgaagcgacccgcattgaccctaacgcctgggtcgaacgctggaaggcggcgggccattaccaggccgaagcggcgttgttgcagtgcacggcagatacacttgccgacgcggtgctgattacaaccgcccacgcgtggcagcatcaggggaaaaccttatttatcagccggaaaacctaccggattgatgggcacggtgagatggtcatcaatgtggatgttgcggtggcaagcgatacaccgcatccggcgcggattggcctgacctgccagctggcgcaggtctcagagcgggtaaactggctcggcctggggccgcaagaaaactatcccgaccgccttactgcagcctgttttgaccgctgggatctgccattgtcagacatgtataccccgtacgtcttcccgagcgaaaacggtctgcgctgcgggacgcgcgaattgaattatggcccacaccagtggcgcggcgacttccagttcaacatcagccgctacagccaacaacaactgatggaaaccagccatcgccatctgctgcacgcggaagaaggcacatggctgaatatcgacggtttccatatggggattggtggcgacgactcctggagcccgtcagtatcggcggaattccagctgagcgccggtcgctaccattaccagttggtctggtgtcaaaaataa

SEQ ID NO: 241 - DNA, 3258 bp, Artificial Sequence
  Synthetic
ggtacccatttcctctcatcccatccggggtgagagtcttttcccccgacttatggctcatgcatgcatcaaaaaagatgtgagcttgatcaaaaacaaaaaatatttcactcgacaggagtatttatattgcgcccgttacgtgggcttcgactgtaaatcagaaaggagaaaacacctatgacgacctacgatcgggatcctctggccgtcgtattacaacgtcgtgactgggaaaaccctggcgttacccaacttaatcgccttgcggcacatccccctttcgccagctggcgtaatagcgaagaggcccgcaccgatcgcccttcccaacagttgcgcagcctgaatggcgaatggcgctttgcctggtttccggcaccagaagcggtgccggaaagctggctggagtgcgatcttcctgacgccgatactgtcgtcgtcccctcaaactggcagatgcacggttacgatgcgcctatctacaccaacgtgacctatcccattacggtcaatccgccgtttgttcccgcggagaatccgacaggttgttactcgctcacatttaatattgatgaaagctggctacaggaaggccagacgcgaattatttttgatggcgttaactcggcgtttcatctgtggtgcaacgggcgctgggtcggttacggccaggacagccgtttgccgtctgaatttgacctgagcgcatttttacgcgccggagaaaaccgcctcgcggtgatggtgctgcgctggagtgacggcagttatctggaagatcaggatatgtggcggatgagcggcattttccgtgacgtctcgttgctgcataaaccgaccacgcaaatcagcgatttccaagttaccactctctttaatgatgatttcagccgcgcggtactggaggcagaagttcagatgtacggcgagctgcgcgatgaactgcgggtgacggtttctttgtggcagggtgaaacgcaggtcgccagcggcaccgcgcctttcggcggtgaaattatcgatgagcgtggcggttatgccgatcgcgtcacactacgcctgaacgttgaaaatccggaactgtggagcgccgaaatcccgaatctctatcgtgcagtggttgaactgcacaccgccgacggcacgctgattgaagcagaagcctgcgacgtcggtttccgcgaggtgcggattgaaaatggtctgctgctgctgaacggcaagccgttgctgattcgcggcgttaaccgtcacgagcatcatcctctgcatggtcaggtcatggatgagcagacgatggtgcaggatatcctgctgatgaagcagaacaactttaacgccgtgcgctgttcgcattatccgaaccatccgctgtggtacacgctgtgcgaccgctacggcctgtatgtggtggatgaagccaatattgaaacccacggcatggtgccaatgaatcgtctgaccgatgatccgcgctggctacccgcgatgagcgaacgcgtaacgcggatggtgcagcgcgatcgtaatcacccgagtgtgatcatctggtcgctggggaatgaatcaggccacggcgctaatcacgacgcgctgtatcgctggatcaaatctgtcgatccttcccgcccggtacagtatgaaggcggcggagccgacaccacggccaccgatattatttgcccgatgtacgcgcgcgtggatgaagaccagcccttcccggcggtgccgaaatggtccatcaaaaaatggctttcgctgcctggagaaatgcgcccgctgatcctttgcgaatatgcccacgcgatgggtaacagtcttggcggcttcgctaaatactggcaggcgtttcgtcagtacccccgtttacagggcggcttcgtctgggactgggtggatcagtcgctgattaaatatgatgaaaacggcaacccgtggtcggcttacggcggtgattttggcgatacgccgaacgatcgccagttctgtatgaacggtctggtctttgccgaccgcacgccgcatccggcgctgacggaagcaaaacaccaacagcagtatttccagttccgtttatccgggcgaaccatcgaagtgaccagcgaatacctgttccgtcatagcgataacgagttcctgcactggatggtggcactggatggcaagccgctggcaagcggtgaagtgcctctggatgttggcccgcaaggtaagcagttgattgaactgcctgaactgccgcagccggagagcgccggacaactctggctaacggtacgcgtagtgcaaccaaacgcgaccgcatggtcagaagccggacacatcagcgcctggcagcaatggcgtctggcggaaaacctcagcgtgacactcccctccgcgtcccacgccatccctcaactgaccaccagcggaacggatttttgcatcgagctgggtaataagcgttggcaatttaaccgccagtcaggctttctttcacagatgtggattggcgatgaaaaacaactgctgaccccgctgcgcgatcagttcacccgtgcgccgctggataacgacattggcgtaagtgaagcgacccgcattgaccctaacgcctgggtcgaacgctggaaggcggcgggccattaccaggccgaagcggcgttgttgcagtgcacggcagatacacttgccgacgcggtgctgattacaaccgcccacgcgtggcagcatcaggggaaaaccttatttatcagccggaaaacctaccggattgatgggcacggtgagatggtcatcaatgtggatgttgcggtggcaagcgatacaccgcatccggcgcggattggcctgacctgccagctggcgcaggtctcagagcgggtaaactggctcggcctggggccgcaagaaaactatcccgaccgccttactgcagcctgttttgaccgctgggatctgccattgtcagacatgtataccccgtacgtcttcccgagcgaaaacggtctgcgctgcgggacgcgcgaattgaattatggcccacaccagtggcgcggcgacttccagttcaacatcagccgctacagccaacaacaactgatggaaaccagccatcgccatctgctgcacgcggaagaaggcacatggctgaatatcgacggtttccatatggggattggtggcgacgactcctggagcccgtcagtatcggcggaattccagctgagcgccggtcgctaccattaccagttggtctggtgtcaaaaataa

SEQ ID NO: 242 - DNA, 3386 bp, Artificial Sequence
  Synthetic
ggtaccgtcagcataacaccctgacctctcattaattgttcatgccgggcggcactatcgtcgtccggccttttcctctcttactctgctacgtacatctatttctataaatccgttcaatttgtctgttttttgcacaaacatgaaatatcagacaattccgtgacttaagaaaatttatacaaatcagcaatataccccttaaggagtatataaaggtgaatttgatttacatcaataagcggggttgctgaatcgttaaggatccctctagaaataattttgtttaactttaagaaggagatatacatatgactatgattacggattctctggccgtcgtattacaacgtcgtgactgggaaaaccctggcgttacccaacttaatcgccttgcggcacatccccctttcgccagctggcgtaatagcgaagaggcccgcaccgatcgcccttcccaacagttgcgcagcctgaatggcgaatggcgctttgcctggtttccggcaccagaagcggtgccggaaagctggctggagtgcgatcttcctgacgccgatactgtcgtcgtcccctcaaactggcagatgcacggttacgatgcgcctatctacaccaacgtgacctatcccattacggtcaatccgccgtttgttcccgcggagaatccgacaggttgttactcgctcacatttaatattgatgaaagctggctacaggaaggccagacgcgaattatttttgatggcgttaactcggcgtttcatctgtggtgcaacgggcgctgggtcggttacggccaggacagccgtttgccgtctgaatttgacctgagcgcatttttacgcgccggagaaaaccgcctcgcggtgatggtgctgcgctggagtgacggcagttatctggaagatcaggatatgtggcggatgagcggcattttccgtgacgtctcgttgctgcataaaccgaccacgcaaatcagcgatttccaagttaccactctctttaatgatgatttcagccgcgcggtactggaggcagaagttcagatgtacggcgagctgcgcgatgaactgcgggtgacggtttctttgtggcagggtgaaacgcaggtcgccagcggcaccgcgcctttcggcggtgaaattatcgatgagcgtggcggttatgccgatcgcgtcacactacgcctgaacgttgaaaatccggaactgtggagcgccgaaatcccgaatctctatcgtgcagtggttgaactgcacaccgccgacggcacgctgattgaagcagaagcctgcgacgtcggtttccgcgaggtgcggattgaaaatggtctgctgctgctgaacggcaagccgttgctgattcgcggcgttaaccgtcacgagcatcatcctctgcatggtcaggtcatggatgagcagacgatggtgcaggatatcctgctgatgaagcagaacaactttaacgccgtgcgctgttcgcattatccgaaccatccgctgtggtacacgctgtgcgaccgctacggcctgtatgtggtggatgaagccaatattgaaacccacggcatggtgccaatgaatcgtctgaccgatgatccgcgctggctacccgcgatgagcgaacgcgtaacgcggatggtgcagcgcgatcgtaatcacccgagtgtgatcatctggtcgctggggaatgaatcaggccacggcgctaatcacgacgcgctgtatcgctggatcaaatctgtcgatccttcccgcccggtacagtatgaaggcggcggagccgacaccacggccaccgatattatttgcccgatgtacgcgcgcgtggatgaagaccagcccttcccggcggtgccgaaatggtccatcaaaaaatggctttcgctgcctggagaaatgcgcccgctgatcctttgcgaatatgcccacgcgatgggtaacagtcttggcggcttcgctaaatactggcaggcgtttcgtcagtacccccgtttacagggcggcttcgtctgggactgggtggatcagtcgctgattaaatatgatgaaaacggcaacccgtggtcggcttacggcggtgattttggcgatacgccgaacgatcgccagttctgtatgaacggtctggtctttgccgaccgcacgccgcatccggcgctgacggaagcaaaacaccaacagcagtatttccagttccgtttatccgggcgaaccatcgaagtgaccagcgaatacctgttccgtcatagcgataacgagttcctgcactggatggtggcactggatggcaagccgctggcaagcggtgaagtgcctctggatgttggcccgcaaggtaagcagttgattgaactgcctgaactgccgcagccggagagcgccggacaactctggctaacggtacgcgtagtgcaaccaaacgcgaccgcatggtcagaagccggacacatcagcgcctggcagcaatggcgtctggcggaaaacctcagcgtgacactcccctccgcgtcccacgccatccctcaactgaccaccagcggaacggatttttgcatcgagctgggtaataagcgttggcaatttaaccgccagtcaggctttctttcacagatgtggattggcgatgaaaaacaactgctgaccccgctgcgcgatcagttcacccgtgcgccgctggataacgacattggcgtaagtgaagcgacccgcattgaccctaacgcctgggtcgaacgctggaaggcggcgggccattaccaggccgaagcggcgttgttgcagtgcacggcagatacacttgccgacgcggtgctgattacaaccgcccacgcgtggcagcatcaggggaaaaccttatttatcagccggaaaacctaccggattgatgggcacggtgagatggtcatcaatgtggatgttgcggtggcaagcgatacaccgcatccggcgcggattggcctgacctgccagctggcgcaggtctcagagcgggtaaactggctcggcctggggccgcaagaaaactatcccgaccgccttactgcagcctgttttgaccgctgggatctgccattgtcagacatgtataccccgtacgtcttcccgagcgaaaacggtctgcgctgcgggacgcgcgaattgaattatggcccacaccagtggcgcggcgacttccagttcaacatcagccgctacagccaacaacaactgatggaaaccagccatcgccatctgctgcacgcggaagaaggcacatggctgaatatcgacggtttccatatggggattggtggcgacgactcctggagcccgtcagtatcggcggaattccagctgagcgccggtcgctaccattaccagttggtctggtgtcaaaaataa

SEQ ID NO: 243 - DNA, 3261 bp, Artificial Sequence
  Synthetic
ggtacccatttcctctcatcccatccggggtgagagtcttttcccccgacttatggctcatgcatgcatcaaaaaagatgtgagcttgatcaaaaacaaaaaatatttcactcgacaggagtatttatattgcgcccggatccctctagaaataattttgtttaactttaagaaggagatatacatatgactatgattacggattctctggccgtcgtattacaacgtcgtgactgggaaaaccctggcgttacccaacttaatcgccttgcggcacatccccctttcgccagctggcgtaatagcgaagaggcccgcaccgatcgcccttcccaacagttgcgcagcctgaatggcgaatggcgctttgcctggtttccggcaccagaagcggtgccggaaagctggctggagtgcgatcttcctgacgccgatactgtcgtcgtcccctcaaactggcagatgcacggttacgatgcgcctatctacaccaacgtgacctatcccattacggtcaatccgccgtttgttcccgcggagaatccgacaggttgttactcgctcacatttaatattgatgaaagctggctacaggaaggccagacgcgaattatttttgatggcgttaactcggcgtttcatctgtggtgcaacgggcgctgggtcggttacggccaggacagccgtttgccgtctgaatttgacctgagcgcatttttacgcgccggagaaaaccgcctcgcggtgatggtgctgcgctggagtgacggcagttatctggaagatcaggatatgtggcggatgagcggcattttccgtgacgtctcgttgctgcataaaccgaccacgcaaatcagcgatttccaagttaccactctctttaatgatgatttcagccgcgcggtactggaggcagaagttcagatgtacggcgagctgcgcgatgaactgcgggtgacggtttctttgtggcagggtgaaacgcaggtcgccagcggcaccgcgcctttcggcggtgaaattatcgatgagcgtggcggttatgccgatcgcgtcacactacgcctgaacgttgaaaatccggaactgtggagcgccgaaatcccgaatctctatcgtgcagtggttgaactgcacaccgccgacggcacgctgattgaagcagaagcctgcgacgtcggtttccgcgaggtgcggattgaaaatggtctgctgctgctgaacggcaagccgttgctgattcgcggcgttaaccgtcacgagcatcatcctctgcatggtcaggtcatggatgagcagacgatggtgcaggatatcctgctgatgaagcagaacaactttaacgccgtgcgctgttcgcattatccgaaccatccgctgtggtacacgctgtgcgaccgctacggcctgtatgtggtggatgaagccaatattgaaacccacggcatggtgccaatgaatcgtctgaccgatgatccgcgctggctacccgcgatgagcgaacgcgtaacgcggatggtgcagcgcgatcgtaatcacccgagtgtgatcatctggtcgctggggaatgaatcaggccacggcgctaatcacgacgcgctgtatcgctggatcaaatctgtcgatccttcccgcccggtacagtatgaaggcggcggagccgacaccacggccaccgatattatttgcccgatgtacgcgcgcgtggatgaagaccagcccttcccggcggtgccgaaatggtccatcaaaaaatggctttcgctgcctggagaaatgcgcccgctgatcctttgcgaatatgcccacgcgatgggtaacagtcttggcggcttcgctaaatactggcaggcgtttcgtcagtacccccgtttacagggcggcttcgtctgggactgggtggatcagtcgctgattaaatatgatgaaaacggcaacccgtggtcggcttacggcggtgattttggcgatacgccgaacgatcgccagttctgtatgaacggtctggtctttgccgaccgcacgccgcatccggcgctgacggaagcaaaacaccaacagcagtatttccagttccgtttatccgggcgaaccatcgaagtgaccagcgaatacctgttccgtcatagcgataacgagttcctgcactggatggtggcactggatggcaagccgctggcaagcggtgaagtgcctctggatgttggcccgcaaggtaagcagttgattgaactgcctgaactgccgcagccggagagcgccggacaactctggctaacggtacgcgtagtgcaaccaaacgcgaccgcatggtcagaagccggacacatcagcgcctggcagcaatggcgtctggcggaaaacctcagcgtgacactcccctccgcgtcccacgccatccctcaactgaccaccagcggaacggatttttgcatcgagctgggtaataagcgttggcaatttaaccgccagtcaggctttctttcacagatgtggattggcgatgaaaaacaactgctgaccccgctgcgcgatcagttcacccgtgcgccgctggataacgacattggcgtaagtgaagcgacccgcattgaccctaacgcctgggtcgaacgctggaaggcggcgggccattaccaggccgaagcggcgttgttgcagtgcacggcagatacacttgccgacgcggtgctgattacaaccgcccacgcgtggcagcatcaggggaaaaccttatttatcagccggaaaacctaccggattgatgggcacggtgagatggtcatcaatgtggatgttgcggtggcaagcgatacaccgcatccggcgcggattggcctgacctgccagctggcgcaggtctcagagcgggtaaactggctcggcctggggccgcaagaaaactatcccgaccgccttactgcagcctgttttgaccgctgggatctgccattgtcagacatgtataccccgtacgtcttcccgagcgaaaacggtctgcgctgcgggacgcgcgaattgaattatggcccacaccagtggcgcggcgacttccagttcaacatcagccgctacagccaacaacaactgatggaaaccagccatcgccatctgctgcacgcggaagaaggcacatggctgaatatcgacggtttccatatggggattggtggcgacgactcctggagcccgtcagtatcggcggaattccagctgagcgccggtcgctaccattaccagttggtctggtgtcaaaaataa

SEQ ID NO: 244 - DNA, 3279 bp, Artificial Sequence
  Synthetic
ggtaccagttgttcttattggtggtgttgctttatggttgcatcgtagtaaatggttgtaacaaaagcaatttttccggctgtctgtatacaaaaacgccgtaaagtttgagcgaagtcaataaactctctacccattcagggcaatatctctcttggatccctctagaaataattttgtttaactttaagaaggagatatacatatgctatgattacggattctctggccgtcgtattacaacgtcgtgactgggaaaaccctggcgttacccaacttaatcgccttgcggcacatccccctttcgccagctggcgtaatagcgaagaggcccgcaccgatcgcccttcccaacagttgcgcagcctgaatggcgaatggcgctttgcctggtttccggcaccagaagcggtgccggaaagctggctggagtgcgatcttcctgacgccgatactgtcgtcgtcccctcaaactggcagatgcacggttacgatgcgcctatctacaccaacgtgacctatcccattacggtcaatccgccgtttgttcccgcggagaatccgacaggttgttactcgctcacatttaatattgatgaaagctggctacaggaaggccagacgcgaattatttttgatggcgttaactcggcgtttcatctgtggtgcaacgggcgctgggtcggttacggccaggacagccgtttgccgtctgaatttgacctgagcgcatttttacgcgccggagaaaaccgcctcgcggtgatggtgctgcgctggagtgacggcagttatctggaagatcaggatatgtggcggatgagcggcattttccgtgacgtctcgttgctgcataaaccgaccacgcaaatcagcgatttccaagttaccactctctttaatgatgatttcagccgcgcggtactggaggcagaagttcagatgtacggcgagctgcgcgatgaactgcgggtgacggtttctttgtggcagggtgaaacgcaggtcgccagcggcaccgcgcctttcggcggtgaaattatcgatgagcgtggcggttatgccgatcgcgtcacactacgcctgaacgttgaaaatccggaactgtggagcgccgaaatcccgaatctctatcgtgcagtggttgaactgcacaccgccgacggcacgctgattgaagcagaagcctgcgacgtcggtttccgcgaggtgcggattgaaaatggtctgctgctgctgaacggcaagccgttgctgattcgcggcgttaaccgtcacgagcatcatcctctgcatggtcaggtcatggatgagcagacgatggtgcaggatatcctgctgatgaagcagaacaactttaacgccgtgcgctgttcgcattatccgaaccatccgctgtggtacacgctgtgcgaccgctacggcctgtatgtggtggatgaagccaatattgaaacccacggcatggtgccaatgaatcgtctgaccgatgatccgcgctggctacccgcgatgagcgaacgcgtaacgcggatggtgcagcgcgatcgtaatcacccgagtgtgatcatctggtcgctggggaatgaatcaggccacggcgctaatcacgacgcgctgtatcgctggatcaaatctgtcgatccttcccgcccggtacagtatgaaggcggcggagccgacaccacggccaccgatattatttgcccgatgtacgcgcgcgtggatgaagaccagcccttcccggcggtgccgaaatggtccatcaaaaaatggctttcgctgcctggagaaatgcgcccgctgatcctttgcgaatatgcccacgcgatgggtaacagtcttggcggcttcgctaaatactggcaggcgtttcgtcagtacccccgtttacagggcggcttcgtctgggactgggtggatcagtcgctgattaaatatgatgaaaacggcaacccgtggtcggcttacggcggtgattttggcgatacgccgaacgatcgccagttctgtatgaacggtctggtctttgccgaccgcacgccgcatccggcgctgacggaagcaaaacaccaacagcagtatttccagttccgtttatccgggcgaaccatcgaagtgaccagcgaatacctgttccgtcatagcgataacgagttcctgcactggatggtggcactggatggcaagccgctggcaagcggtgaagtgcctctggatgttggcccgcaaggtaagcagttgattgaactgcctgaactgccgcagccggagagcgccggacaactctggctaacggtacgcgtagtgcaaccaaacgcgaccgcatggtcagaagccggacacatcagcgcctggcagcaatggcgtctggcggaaaacctcagcgtgacactcccctccgcgtcccacgccatccctcaactgaccaccagcggaacggatttttgcatcgagctgggtaataagcgttggcaatttaaccgccagtcaggctttctttcacagatgtggattggcgatgaaaaacaactgctgaccccgctgcgcgatcagttcacccgtgcgccgctggataacgacattggcgtaagtgaagcgacccgcattgaccctaacgcctgggtcgaacgctggaaggcggcgggccattaccaggccgaagcggcgttgttgcagtgcacggcagatacacttgccgacgcggtgctgattacaaccgcccacgcgtggcagcatcaggggaaaaccttatttatcagccggaaaacctaccggattgatgggcacggtgagatggtcatcaatgtggatgttgcggtggcaagcgatacaccgcatccggcgcggattggcctgacctgccagctggcgcaggtctcagagcgggtaaactggctcggcctggggccgcaagaaaactatcccgaccgccttactgcagcctgttttgaccgctgggatctgccattgtcagacatgtataccccgtacgtcttcccgagcgaaaacggtctgcgctgcgggacgcgcgaattgaattatggcccacaccagtggcgcggcgacttccagttcaacatcagccgctacagccaacaacaactgatggaaaccagccatcgccatctgctgcacgcggaagaaggcacatggctgaatatcgacggtttccatatggggattggtggcgacgactcctggagcccgtcagtatcggcggaattccagctgagcgccggtcgctaccattaccagttggtctggtgtcaaaaataa

SEQ ID NO: 245 - DNA, 1420 bp, Artificial Sequence
  Synthetic
ttattatcgcaccgcaatcgggattttcgattcataaagcaggtcgtaggtcggcttgttgagcaggtcttgcagcgtgaaaccgtccagatacgtgaaaaacgacttcattgcaccgccgagtatgcccgtcagccggcaggacggcgtaatcaggcattcgttgttcgggcccatacactcgaccagctgcatcggttcgaggtggcggacgaccgcgccgatattgatgcgttcgggcggcgcggccagcctcagcccgccgcctttcccgcgtacgctgtgcaagaacccgcctttgaccagcgcggtaaccactttcatcaaatggcttttggaaatgccgtaggtcgaggcgatggtggcgatattgaccagcgcgtcgtcgttgacggcggtgtagatgaggacgcgcagcccgtagtcggtatgttgggtcagatacatacaacctccttagtacatgcaaaattatttctagagcaacatacgagccggaagcataaagtgtaaagcctggggtgcctaatgagttgagttgaggaattataacaggaagaaatattcctcatacgcttgtaattcctctatggttgttgacaattaatcatcggctcgtataatgtataacattcatattttgtgaattttaaactctagaaataattttgtttaactttaagaaggagatatacatatggctagcaaaggcgaagaattgttcacgggcgttgttcctattttggttgaattggatggcgatgttaatggccataaattcagcgttagcggcgaaggcgaaggcgatgctacgtatggcaaattgacgttgaaattcatttgtacgacgggcaaattgcctgttccttggcctacgttggttacgacgttcagctatggcgttcaatgtttcagccgttatcctgatcatatgaaacgtcatgatttcttcaaaagcgctatgcctgaaggctatgttcaagaacgtacgattagcttcaaagatgatggcaattataaaacgcgtgctgaagttaaattcgaaggcgatacgttggttaatcgtattgaattgaaaggcattgatttcaaagaagatggcaatattttgggccataaattggaatataattataatagccataatgtttatattacggctgataaacaaaaaaatggcattaaagctaatttcaaaattcgtcataatattgaagatggcagcgttcaattggctgatcattatcaacaaaatacgcctattggcgatggccctgttttgttgcctgataatcattatttgagcacgcaaagcgctttgagcaaagatcctaatgaaaaacgtgatcatatggttttgttggaattcgttacggctgctggcattacgcatggcatggatgaattgtataaataataa

SEQ ID NO: 246 - DNA, 60 bp, Artificial Sequence
  Synthetic
tagaactgatgcaaaaagtgctcgacgaaggcacacagatgtgtaggctggagctgcttc

SEQ ID NO: 247 - DNA, 60 bp, Artificial Sequence
  Synthetic
gtttcgtaattagatagccaccggcgctttaatgcccggacatatgaatatcctccttag

SEQ ID NO: 248 - DNA, 52 bp, Artificial Sequence
  Synthetic
caacacgtttcctgaggaaccatgaaacagtatttagaactgatgcaaaaag

SEQ ID NO: 249 - DNA, 46 bp, Artificial Sequence
  Synthetic
cgcacactggcgtcggctctggcaggatgtttcgtaattagatagc

SEQ ID NO: 250 - DNA, 36 bp, Artificial Sequence
  Synthetic
atatcgtcgcagcccacagcaacacgtttcctgagg

SEQ ID NO: 251 - DNA, 47 bp, Artificial Sequence
  Synthetic
aagaatttaacggagggcaaaaaaaaccgacgcacactggcgtcggc

SEQ ID NO: 252-254 - skipped (3 entries)

SEQ ID NO: 255 - DNA, 1096 bp, Artificial Sequence
  Synthetic
ctctagaaataattttgtttaactttaagaaggagatatacatatgaattatcagaacgacgatttacgcatcaaagaaatcaaagagttacttcctcctgtcgcattgctggaaaaattccccgctactgaaaatgccgcgaatacggtcgcccatgcccgaaaagcgatccataagatcctgaaaggtaatgatgatcgcctgttggtggtgattggcccatgctcaattcatgatcctgtcgcggctaaagagtatgccactcgcttgctgacgctgcgtgaagagctgcaagatgagctggaaatcgtgatgcgcgtctattttgaaaagccgcgtactacggtgggctggaaagggctgattaacgatccgcatatggataacagcttccagatcaacgacggtctgcgtattgcccgcaaattgctgctcgatattaacgacagcggtctgccagcggcgggtgaattcctggatatgatcaccctacaatatctcgctgacctgatgagctggggcgcaattggcgcacgtaccaccgaatcgcaggtgcaccgcgaactggcgtctggtctttcttgtccggtaggtttcaaaaatggcactgatggtacgattaaagtggctatcgatgccattaatgccgccggtgcgccgcactgcttcctgtccgtaacgaaatgggggcattcggcgattgtgaataccagcggtaacggcgattgccatatcattctgcgcggcggtaaagagcctaactacagcgcgaagcacgttgctgaagtgaaagaagggctgaacaaagcaggcctgccagcgcaggtgatgatcgatttcagccatgctaactcgtcaaaacaattcaaaaagcagatggatgtttgtactgacgtttgccagcagattgccggtggcgaaaaggccattattggcgtgatggtggaaagccatctggtggaaggcaatcagagcctcgagagcggggaaccgctggcctacggtaagagcatcaccgatgcctgcattggctgggatgataccgatgctctgttacgtcaactggcgagtgcagtaaaagcgcgtcgcgggtaa

SEQ ID NO: 256 - DNA, 1053 bp, Artificial Sequence
  Synthetic
atgaattatcagaacgacgatttacgcatcaaagaaatcaaagagttacttcctcctgtcgcattgctggaaaaattccccgctactgaaaatgccgcgaatacggtcgcccatgcccgaaaagcgatccataagatcctgaaaggtaatgatgatcgcctgttggtggtgattggcccatgctcaattcatgatcctgtcgcggctaaagagtatgccactcgcttgctgacgctgcgtgaagagctgcaagatgagctggaaatcgtgatgcgcgtctattttgaaaagccgcgtactacggtgggctggaaagggctgattaacgatccgcatatggataacagcttccagatcaacgacggtctgcgtattgcccgcaaattgctgctcgatattaacgacagcggtctgccagcggcgggtgaattcctggatatgatcaccctacaatatctcgctgacctgatgagctggggcgcaattggcgcacgtaccaccgaatcgcaggtgcaccgcgaactggcgtctggtctttcttgtccggtaggtttcaaaaatggcactgatggtacgattaaagtggctatcgatgccattaatgccgccggtgcgccgcactgcttcctgtccgtaacgaaatgggggcattcggcgattgtgaataccagcggtaacggcgattgccatatcattctgcgcggcggtaaagagcctaactacagcgcgaagcacgttgctgaagtgaaagaagggctgaacaaagcaggcctgccagcgcaggtgatgatcgatttcagccatgctaactcgtcaaaacaattcaaaaagcagatggatgtttgtactgacgtttgccagcagattgccggtggcgaaaaggccattattggcgtgatggtggaaagccatctggtggaaggcaatcagagcctcgagagcggggaaccgctggcctacggtaagagcatcaccgatgcctgcattggctgggatgataccgatgctctgttacgtcaactggcgagtgcagtaaaagcgcgtcgcgggtaa

SEQ ID NO: 257 - DNA, 2351 bp, Artificial Sequence
  Synthetic
ctctagaaataattttgtttaactttaagaaggagatatacatatgaattatcagaacgacgatttacgcatcaaagaaatcaaagagttacttcctcctgtcgcattgctggaaaaattccccgctactgaaaatgccgcgaatacggtcgcccatgcccgaaaagcgatccataagatcctgaaaggtaatgatgatcgcctgttggtggtgattggcccatgctcaattcatgatcctgtcgcggctaaagagtatgccactcgcttgctgacgctgcgtgaagagctgcaagatgagctggaaatcgtgatgcgcgtctattttgaaaagccgcgtactacggtgggctggaaagggctgattaacgatccgcatatggataacagcttccagatcaacgacggtctgcgtattgcccgcaaattgctgctcgatattaacgacagcggtctgccagcggcgggtgaattcctggatatgatcaccctacaatatctcgctgacctgatgagctggggcgcaattggcgcacgtaccaccgaatcgcaggtgcaccgcgaactggcgtctggtctttcttgtccggtaggtttcaaaaatggcactgatggtacgattaaagtggctatcgatgccattaatgccgccggtgcgccgcactgcttcctgtccgtaacgaaatgggggcattcggcgattgtgaataccagcggtaacggcgattgccatatcattctgcgcggcggtaaagagcctaactacagcgcgaagcacgttgctgaagtgaaagaagggctgaacaaagcaggcctgccagcgcaggtgatgatcgatttcagccatgctaactcgtcaaaacaattcaaaaagcagatggatgtttgtactgacgtttgccagcagattgccggtggcgaaaaggccattattggcgtgatggtggaaagccatctggtggaaggcaatcagagcctcgagagcggggaaccgctggcctacggtaagagcatcaccgatgcctgcattggctgggatgataccgatgctctgttacgtcaactggcgagtgcagtaaaagcgcgtcgcgggtaatacttaagaaggagatatacatatggcaaaggtatcgctggagaaagacaagattaagtttctgctggtagaaggcgtgcaccaaaaggcgctggaaagccttcgtgcagctggttacaccaacatcgaatttcacaaaggcgcgctggatgatgaacaattaaaagaatccatccgcgatgcccacttcatcggcctgcgatcccgtacccatctgactgaagacgtgatcaacgccgcagaaaaactggtcgctattggctgtttctgtatcggaacaaatcaggttgatctggatgcggcggcaaagcgcgggatcccggtatttaacgcaccgttctcaaatacgcgctctgttgcggagctggtgattggcgaactgctgctgctattgcgcggcgtgccagaagccaatgctaaagcgcatcgtggcgtgtggaacaaactggcggcgggttcttttgaagcgcgcggcaaaaagctgggtatcatcggctacggtcatattggtacgcaattgggcattctggctgaatcgctgggaatgtatgtttacttttatgatattgaaaacaaactgccgctgggcaacgccactcaggtacagcatctttctgacctgctgaatatgagcgatgtggtgagtctgcatgtaccagagaatccgtccaccaaaaatatgatgggcgcgaaagagatttcgctaatgaagcccggctcgctgctgattaatgcttcgcgcggtactgtggtggatattccagcgctgtgtgacgcgctggcgagcaaacatctggcgggggcggcaatcgacgtattcccgacggaaccggcgaccaatagcgatccatttacctctccgctgtgtgaattcgacaatgtccttctgacgccacacattggcggttcgactcaggaagcgcaggagaatatcggcttggaagttgcgggtaaattgatcaagtattctgacaatggctcaacgctctctgcggtgaacttcccggaagtctcgctgccactgcacggtgggcgtcgtctgatgcacatccacgaaaaccgtccgggcgtgctaactgcgctcaacaaaatttttgccgagcagggcgtcaacatcgccgcgcaatatctacaaacttccgcccagatgggttatgtagttattgatattgaagccgacgaagacgttgccgaaaaagcgctgcaggcaatgaaagctattccgggtaccattcgcgcccgtctgctgtactaa

SEQ ID NO: 258 - DNA, 1233 bp, Artificial Sequence
  Synthetic
atggcaaaggtatcgctggagaaagacaagattaagtttctgctggtagaaggcgtgcaccaaaaggcgctggaaagccttcgtgcagctggttacaccaacatcgaatttcacaaaggcgcgctggatgatgaacaattaaaagaatccatccgcgatgcccacttcatcggcctgcgatcccgtacccatctgactgaagacgtgatcaacgccgcagaaaaactggtcgctattggctgtttctgtatcggaacaaatcaggttgatctggatgcggcggcaaagcgcgggatcccggtatttaacgcaccgttctcaaatacgcgctctgttgcggagctggtgattggcgaactgctgctgctattgcgcggcgtgccagaagccaatgctaaagcgcatcgtggcgtgtggaacaaactggcggcgggttcttttgaagcgcgcggcaaaaagctgggtatcatcggctacggtcatattggtacgcaattgggcattctggctgaatcgctgggaatgtatgtttacttttatgatattgaaaacaaactgccgctgggcaacgccactcaggtacagcatctttctgacctgctgaatatgagcgatgtggtgagtctgcatgtaccagagaatccgtccaccaaaaatatgatgggcgcgaaagagatttcgctaatgaagcccggctcgctgctgattaatgcttcgcgcggtactgtggtggatattccagcgctgtgtgacgcgctggcgagcaaacatctggcgggggcggcaatcgacgtattcccgacggaaccggcgaccaatagcgatccatttacctctccgctgtgtgaattcgacaatgtccttctgacgccacacattggcggttcgactcaggaagcgcaggagaatatcggcttggaagttgcgggtaaattgatcaagtattctgacaatggctcaacgctctctgcggtgaacttcccggaagtctcgctgccactgcacggtgggcgtcgtctgatgcacatccacgaaaaccgtccgggcgtgctaactgcgctcaacaaaatttttgccgagcagggcgtcaacatcgccgcgcaatatctacaaacttccgcccagatgggttatgtagttattgatattgaagccgacgaagacgttgccgaaaaagcgctgcaggcaatgaaagctattccgggtaccattcgcgcccgtctgctgtactaa

SEQ ID NO: 259 - DNA, 2621 bp, C. roseus
ctctagaaataattttgtttaactttaagaaggagatatacatatgaattatcagaacgacgatttacgcatcaaagaaatcaaagagttacttcctcctgtcgcattgctggaaaaattccccgctactgaaaatgccgcgaatacggtcgcccatgcccgaaaagcgatccataagatcctgaaaggtaatgatgatcgcctgttggtggtgattggcccatgctcaattcatgatcctgtcgcggctaaagagtatgccactcgcttgctgacgctgcgtgaagagctgcaagatgagctggaaatcgtgatgcgcgtctattttgaaaagccgcgtactacggtgggctggaaagggctgattaacgatccgcatatggataacagcttccagatcaacgacggtctgcgtattgcccgcaaattgctgctcgatattaacgacagcggtctgccagcggcgggtgaattcctggatatgatcaccctacaatatctcgctgacctgatgagctggggcgcaattggcgcacgtaccaccgaatcgcaggtgcaccgcgaactggcgtctggtctttcttgtccggtaggtttcaaaaatggcactgatggtacgattaaagtggctatcgatgccattaatgccgccggtgcgccgcactgcttcctgtccgtaacgaaatgggggcattcggcgattgtgaataccagcggtaacggcgattgccatatcattctgcgcggcggtaaagagcctaactacagcgcgaagcacgttgctgaagtgaaagaagggctgaacaaagcaggcctgccagcgcaggtgatgatcgatttcagccatgctaactcgtcaaaacaattcaaaaagcagatggatgtttgtactgacgtttgccagcagattgccggtggcgaaaaggccattattggcgtgatggtggaaagccatctggtggaaggcaatcagagcctcgagagcggggaaccgctggcctacggtaagagcatcaccgatgcctgcattggctgggatgataccgatgctctgttacgtcaactggcgagtgcagtaaaagcgcgtcgcgggtaatacttaagaaggagatatacatatgggttctattgactcgacgaatgtggccatgtctaattctcctgttggcgagtttaagccccttgaagcagaagagttccgtaaacaggcacaccgcatggtggattttattgcggattattacaagaacgtagaaacatacccggtcctttccgaggttgaacccggctatctgcgcaaacgtattcccgaaaccgcaccatacctgccggagccacttgatgatattatgaaggatattcaaaaggacattatccccggaatgacgaactggatgtccccgaacttttacgccttcttcccggccacagttagctcagcagctttcttgggggaaatgctttcaacggcccttaacagcgtaggatttacctgggtcagttccccggcagcgactgaattagagatgatcgttatggattggcttgcgcaaattttgaaacttccaaaaagctttatgttctccggaaccgggggtggtgtcatccaaaacactacgtcagagtcgatcttgtgcactattatcgcggcccgtgaacgcgccttggaaaaattgggccctgattcaattggtaagcttgtctgctatgggtccgatcaaacgcacacaatgtttccgaaaacctgtaagttagcaggaatttatccgaataatatccgccttatccctaccacggtagaaaccgactttggcatctcaccgcaggtacttcgcaagatggtcgaagacgacgtcgctgcggggtacgttcccttatttttgtgtgccaccttgggaacgacatcaactacggcaacagatcctgtagattcgctgtccgaaatcgcaaacgagtttggtatctggattcatgtcgacgccgcatatgctggatcggcttgcatctgcccagaatttcgtcactaccttgatggcatcgaacgtgtggattccttatcgctgtctccccacaaatggcttttagcatatctggattgcacgtgcttgtgggtaaaacaacctcacctgctgcttcgcgctttaacgactaatcccgaatacttgaagaataaacagagtgatttagataaggtcgtggattttaagaactggcagatcgcaacaggacgtaagttccgctctttaaaactttggttaattctgcgttcctacggggtagttaacctgcaaagtcatatccgtagtgatgtagcgatggggaagatgtttgaggaatgggtccgttccgatagccgctttgaaatcgtcgtgccacgtaatttttcgcttgtatgctttcgcttgaaaccggatgtatctagtttacatgtcgaggaggtcaacaagaagttgttggatatgcttaactccaccggtcgcgtatatatgacgcatacaattgttggcggaatctatatgttacgtttggctgtaggtagcagcttgacagaggaacatcacgtgcgccgcgtttgggacttgatccagaagcttacggacgacctgcttaaagaggcgtga

SEQ ID NO: 260 - DNA, 1503 bp, C. roseus
atgggttctattgactcgacgaatgtggccatgtctaattctcctgttggcgagtttaagccccttgaagcagaagagttccgtaaacaggcacaccgcatggtggattttattgcggattattacaagaacgtagaaacatacccggtcctttccgaggttgaacccggctatctgcgcaaacgtattcccgaaaccgcaccatacctgccggagccacttgatgatattatgaaggatattcaaaaggacattatccccggaatgacgaactggatgtccccgaacttttacgccttcttcccggccacagttagctcagcagctttcttgggggaaatgctttcaacggcccttaacagcgtaggatttacctgggtcagttccccggcagcgactgaattagagatgatcgttatggattggcttgcgcaaattttgaaacttccaaaaagctttatgttctccggaaccgggggtggtgtcatccaaaacactacgtcagagtcgatcttgtgcactattatcgcggcccgtgaacgcgccttggaaaaattgggccctgattcaattggtaagcttgtctgctatgggtccgatcaaacgcacacaatgtttccgaaaacctgtaagttagcaggaatttatccgaataatatccgccttatccctaccacggtagaaaccgactttggcatctcaccgcaggtacttcgcaagatggtcgaagacgacgtcgctgcggggtacgttcccttatttttgtgtgccaccttgggaacgacatcaactacggcaacagatcctgtagattcgctgtccgaaatcgcaaacgagtttggtatctggattcatgtcgacgccgcatatgctggatcggcttgcatctgcccagaatttcgtcactaccttgatggcatcgaacgtgtggattccttatcgctgtctccccacaaatggcttttagcatatctggattgcacgtgcttgtgggtaaaacaacctcacctgctgcttcgcgctttaacgactaatcccgaatacttgaagaataaacagagtgatttagataaggtcgtggattttaagaactggcagatcgcaacaggacgtaagttccgctctttaaaactttggttaattctgcgttcctacggggtagttaacctgcaaagtcatatccgtagtgatgtagcgatggggaagatgtttgaggaatgggtccgttccgatagccgctttgaaatcgtcgtgccacgtaatttttcgcttgtatgctttcgcttgaaaccggatgtatctagtttacatgtcgaggaggtcaacaagaagttgttggatatgcttaactccaccggtcgcgtatatatgacgcatacaattgttggcggaatctatatgttacgtttggctgtaggtagcagcttgacagaggaacatcacgtgcgccgcgtttgggacttgatccagaagcttacggacgacctgcttaaagaggcgtga

SEQ ID NO: 261 - DNA, 2372 bp, Clostridium sporogenes
ctctagaaataattttgtttaactttaagaaggagatatacatatgaattatcagaacgacgatttacgcatcaaagaaatcaaagagttacttcctcctgtcgcattgctggaaaaattccccgctactgaaaatgccgcgaatacggtcgcccatgcccgaaaagcgatccataagatcctgaaaggtaatgatgatcgcctgttggtggtgattggcccatgctcaattcatgatcctgtcgcggctaaagagtatgccactcgcttgctgacgctgcgtgaagagctgcaagatgagctggaaatcgtgatgcgcgtctattttgaaaagccgcgtactacggtgggctggaaagggctgattaacgatccgcatatggataacagcttccagatcaacgacggtctgcgtattgcccgcaaattgctgctcgatattaacgacagcggtctgccagcggcgggtgaattcctggatatgatcaccctacaatatctcgctgacctgatgagctggggcgcaattggcgcacgtaccaccgaatcgcaggtgcaccgcgaactggcgtctggtctttcttgtccggtaggtttcaaaaatggcactgatggtacgattaaagtggctatcgatgccattaatgccgccggtgcgccgcactgcttcctgtccgtaacgaaatgggggcattcggcgattgtgaataccagcggtaacggcgattgccatatcattctgcgcggcggtaaagagcctaactacagcgcgaagcacgttgctgaagtgaaagaagggctgaacaaagcaggcctgccagcgcaggtgatgatcgatttcagccatgctaactcgtcaaaacaattcaaaaagcagatggatgtttgtactgacgtttgccagcagattgccggtggcgaaaaggccattattggcgtgatggtggaaagccatctggtggaaggcaatcagagcctcgagagcggggaaccgctggcctacggtaagagcatcaccgatgcctgcattggctgggatgataccgatgctctgttacgtcaactggcgagtgcagtaaaagcgcgtcgcgggtaatacttaagaaggagatatacatatgaaattttggcgcaagtatacgcaacaggagatggatgagaaaatcacagaatcgcttgagaagacattaaattacgataacacgaaaaccatcggcatcccaggtactaagctggatgatactgtattttatgacgatcactccttcgttaagcactctccctatttacgtacgttcatccaaaaccctaatcacattggttgtcacacgtacgataaagcagacatcttgtttggcggcacgtttgacatcgaacgcgaactgattcagcttttggccatcgatgtcttaaacggaaatgatgaggaattcgatggatatgtgacacaggggggaaccgaggcgaatattcaggcaatgtgggtttatcgtaactatttcaaaaaagaacgtaaagcaaaacatgaggaaatcgcaatcatcacgagcgcggatacccattacagtgcatataaggggagcgacttgctgaacattgatattatcaaggtcccagtagacttctattcgcgtaagatccaggagaacacgttagactcgattgtcaaggaggcgaaggaaattggaaagaagtacttcattgtcatctcaaacatgggtacgactatgtttggcagtgtagacgaccctgatctttatgctaacatttttgataagtataacttagaatacaaaatccacgtcgatggagcttttgggggtttcatttatcctatcgataataaggagtgcaaaacagatttctcgaacaagaacgtctcatccatcacgcttgacggtcacaaaatgcttcaagccccctatgggactggtatcttcgtgtcacgtaagaacttgatccataacaccctgacaaaggaagcaacgtatattgaaaacctggacgttaccctgagtgggtcccgctccggatccaacgccgttgcgatctggatggttttagcctcttatggcccctacgggtggatggagaagattaacaagttgcgcaatcgcactaagtggctttgcaagcagcttaacgacatgcgcatcaaatactataaggaggatagcatgaatatcgtcacgattgaagagcaatacgtaaataaagagattgcagagaaatacttccttgtgcctgaagtacacaatcctaccaacaattggtacaagattgtagtcatggaacatgttgaacttgacatcttgaactcccttgtttatgatttacgtaaattcaacaaggagcacctgaaggcaatgtga

SEQ ID NO: 262 - DNA, 1254 bp, Clostridium sporogenes
atgaaattttggcgcaagtatacgcaacaggagatggatgagaaaatcacagaatcgcttgagaagacattaaattacgataacacgaaaaccatcggcatcccaggtactaagctggatgatactgtattttatgacgatcactccttcgttaagcactctccctatttacgtacgttcatccaaaaccctaatcacattggttgtcacacgtacgataaagcagacatcttgtttggcggcacgtttgacatcgaacgcgaactgattcagcttttggccatcgatgtcttaaacggaaatgatgaggaattcgatggatatgtgacacaggggggaaccgaggcgaatattcaggcaatgtgggtttatcgtaactatttcaaaaaagaacgtaaagcaaaacatgaggaaatcgcaatcatcacgagcgcggatacccattacagtgcatataaggggagcgacttgctgaacattgatattatcaaggtcccagtagacttctattcgcgtaagatccaggagaacacgttagactcgattgtcaaggaggcgaaggaaattggaaagaagtacttcattgtcatctcaaacatgggtacgactatgtttggcagtgtagacgaccctgatctttatgctaacatttttgataagtataacttagaatacaaaatccacgtcgatggagcttttgggggtttcatttatcctatcgataataaggagtgcaaaacagatttctcgaacaagaacgtctcatccatcacgcttgacggtcacaaaatgcttcaagccccctatgggactggtatcttcgtgtcacgtaagaacttgatccataacaccctgacaaaggaagcaacgtatattgaaaacctggacgttaccctgagtgggtcccgctccggatccaacgccgttgcgatctggatggttttagcctcttatggcccctacgggtggatggagaagattaacaagttgcgcaatcgcactaagtggctttgcaagcagcttaacgacatgcgcatcaaatactataaggaggatagcatgaatatcgtcacgattgaagagcaatacgtaaataaagagattgcagagaaatacttccttgtgcctgaagtacacaatcctaccaacaattggtacaagattgtagtcatggaacatgttgaacttgacatcttgaactcccttgtttatgatttacgtaaattcaacaaggagcacctgaaggcaatgtga

SEQ ID NO: 263 - DNA, 5377 bp, Artificial Sequence
  Synthetic
ctctagaaataattttgtttaactttaagaaggagatatacatatgaattatcagaacgacgatttacgcatcaaagaaatcaaagagttacttcctcctgtcgcattgctggaaaaattccccgctactgaaaatgccgcgaatacggtcgcccatgcccgaaaagcgatccataagatcctgaaaggtaatgatgatcgcctgttggtggtgattggcccatgctcaattcatgatcctgtcgcggctaaagagtatgccactcgcttgctgacgctgcgtgaagagctgcaagatgagctggaaatcgtgatgcgcgtctattttgaaaagccgcgtactacggtgggctggaaagggctgattaacgatccgcatatggataacagcttccagatcaacgacggtctgcgtattgcccgcaaattgctgctcgatattaacgacagcggtctgccagcggcgggtgaattcctggatatgatcaccctacaatatctcgctgacctgatgagctggggcgcaattggcgcacgtaccaccgaatcgcaggtgcaccgcgaactggcgtctggtctttcttgtccggtaggtttcaaaaatggcactgatggtacgattaaagtggctatcgatgccattaatgccgccggtgcgccgcactgcttcctgtccgtaacgaaatgggggcattcggcgattgtgaataccagcggtaacggcgattgccatatcattctgcgcggcggtaaagagcctaactacagcgcgaagcacgttgctgaagtgaaagaagggctgaacaaagcaggcctgccagcgcaggtgatgatcgatttcagccatgctaactcgtcaaaacaattcaaaaagcagatggatgtttgtactgacgtttgccagcagattgccggtggcgaaaaggccattattggcgtgatggtggaaagccatctggtggaaggcaatcagagcctcgagagcggggaaccgctggcctacggtaagagcatcaccgatgcctgcattggctgggatgataccgatgctctgttacgtcaactggcgagtgcagtaaaagcgcgtcgcgggtaatacttaagaaggagatatacatatgctgttattcgagactgtgcgtgaaatgggtcatgagcaagtccttttctgtcatagcaagaatcccgagatcaaggcaattatcgcaatccacgataccaccttaggaccggctatgggcgcaactcgtatcttaccttatattaatgaggaggctgccctgaaagatgcattacgtctgtcccgcggaatgacttacaaagcagcctgcgccaatattcccgccgggggcggcaaagccgtcatcatcgctaaccccgaaaacaagaccgatgacctgttacgcgcatacggccgtttcgtggacagcttgaacggccgtttcatcaccgggcaggacgttaacattacgcccgacgacgttcgcactatttcgcaggagactaagtacgtggtaggcgtctcagaaaagtcgggagggccggcacctatcacctctctgggagtatttttaggcatcaaagccgctgtagagtcgcgttggcagtctaaacgcctggatggcatgaaagtggcggtgcaaggacttgggaacgtaggaaaaaatctttgtcgccatctgcatgaacacgatgtacaactttttgtgtctgatgtcgatccaatcaaggccgaggaagtaaaacgcttattcggggcgactgttgtcgaaccgactgaaatctattctttagatgttgatatttttgcaccgtgtgcacttgggggtattttgaatagccataccatcccgttcttacaagcctcaatcatcgcaggagcagcgaataaccagctggagaacgagcaacttcattcgcagatgcttgcgaaaaagggtattctttactcaccagactacgttatcaatgcaggaggacttatcaatgtttataacgaaatgatcggatatgacgaggaaaaagcattcaaacaagttcataacatctacgatacgttattagcgattttcgaaattgcaaaagaacaaggtgtaaccaccaacgacgcggcccgtcgtttagcagaggatcgtatcaacaactccaaacgctcaaagagtaaagcgattgcggcgtgaaatgtaagaaggagatatacatatgcgtacaccctactgtgtcgccgattatcttttagatcgtctgacggactgcggggccgatcacctgtttggcgtaccgggcgattacaacttgcagtttctggaccacgtcattgactcaccagatatctgctgggtagggtgtgcgaacgagcttaacgcgagctacgctgctgacggatatgcgcgttgtaaaggctttgctgcacttcttactaccttcggggtcggtgagttatcggcgatgaacggtatcgcaggctcgtacgctgagcacgtcccggtattacacattgtgggagctccgggtaccgcagctcaacagcgcggagaactgttacaccacacgctgggcgacggagaattccgccacttttaccatatgtccgagccaattactgtagcccaggctgtacttacagagcaaaatgcctgttacgagatcgaccgtgttttgaccacgatgcttcgcgagcgccgtcccgggtatttgatgctgccagccgatgttgccaaaaaagctgcgacgcccccagtgaatgccctgacgcataaacaagctcatgccgattccgcctgtttaaaggcttttcgcgatgcagctgaaaataaattagccatgtcgaaacgcaccgccttgttggcggactttctggtcctgcgccatggccttaaacacgcccttcagaaatgggtcaaagaagtcccgatggcccacgctacgatgcttatgggtaaggggatttttgatgaacgtcaagcgggattttatggaacttattccggttcggcgagtacgggggcggtaaaggaagcgattgagggagccgacacagttctttgcgtggggacacgtttcaccgatacactgaccgctggattcacacaccaacttactccggcacaaacgattgaggtgcaaccccatgcggctcgcgtgggggatgtatggtttacgggcattccaatgaatcaagccattgagactcttgtcgagctgtgcaaacagcacgtccacgcaggactgatgagttcgagctctggggcgattccttttccacaaccagatggtagtttaactcaagaaaacttctggcgcacattgcaaacctttatccgcccaggtgatatcatcttagcagaccagggtacttcagcctttggagcaattgacctgcgcttaccagcagacgtgaactttattgtgcagccgctgtgggggtctattggttatactttagctgcggccttcggagcgcagacagcgtgtccaaaccgtcgtgtgatcgtattgacaggagatggagcagcgcagttgaccattcaggagttaggctcgatgttacgcgataagcagcaccccattatcctggtcctgaacaatgaggggtatacagttgaacgcgccattcatggtgcggaacaacgctacaatgacatcgctttatggaattggacgcacatcccccaagccttatcgttagatccccaatcggaatgttggcgtgtgtctgaagcagagcaactggctgatgttctggaaaaagttgctcatcatgaacgcctgtcgttgatcgaggtaatgttgcccaaggccgatatccctccgttactgggagccttgaccaaggctttagaagcctgcaacaacgcttaaaggttaagaaggagatatacatatgcccaccttgaacttggacttacccaacggtattaagagcacgattcaggcagaccttttcatcaataataagtttgtgccggcgcttgatgggaaaacgttcgcaactattaatccgtctacggggaaagagatcggacaggtggcagaggcttcggcgaaggatgtggatcttgcagttaaggccgcgcgtgaggcgtttgaaactacttggggggaaaacacgccaggtgatgctcgtggccgtttactgattaagcttgctgagttggtggaagcgaatattgatgagttagcggcaattgaatcactggacaatgggaaagcgttctctattgctaagtcattcgacgtagctgctgtggccgcaaacttacgttactacggcggttgggctgataaaaaccacggtaaagtcatggaggtagacacaaagcgcctgaactatacccgccacgagccgatcggggtttgcggacaaatcattccgtggaatttcccgcttttgatgtttgcatggaagctgggtcccgctttagccacagggaacacaattgtgttaaagactgccgagcagactcccttaagtgctatcaagatgtgtgaattaatcgtagaagccggctttccgcccggagtagttaatgtgatctcgggattcggaccggtggcgggggccgcgatctcgcaacacatggacatcgataagattgcctttacaggatcgacattggttggccgcaacattatgaaggcagctgcgtcgactaacttaaaaaaggttacacttgagttaggaggaaaatccccgaatatcattttcaaagatgccgaccttgaccaagctgttcgctggagcgccttcggtatcatgtttaaccacggacaatgctgctgcgctggatcgcgcgtatatgtggaagaatccatctatgacgccttcatggaaaaaatgactgcgcattgtaaggcgcttcaagttggagatcctttcagcgcgaacaccttccaaggaccacaagtctcgcagttacaatacgaccgtatcatggaatacatcgaatcagggaaaaaagatgcaaatcttgctttaggcggcgttcgcaaagggaatgaggggtatttcattgagccaactatttttacagacgtgccgcacgacgcgaagattgccaaagaggagatcttcggtccagtggttgttgtgtcgaaatttaaggacgaaaaagatctgatccgtatcgcaaatgattctatttatggtttagctgcggcagtcttttcccgcgacatcagccgcgcgatcgagacagcacacaaactgaaagcaggcacggtctgggtcaactgctataatcagcttattccgcaggtgccattcggagggtataaggcttccggtatcggccgtgagttgggggaatatgccttgtctaattacacaaatatcaaggccgtccacgttaacctttctcaaccggcgcccatttga

SEQ ID NO: 264 - DNA, 1062 bp, Artificial Sequence
  Synthetic
atgctgttattcgagactgtgcgtgaaatgggtcatgagcaagtccttttctgtcatagcaagaatcccgagatcaaggcaattatcgcaatccacgataccaccttaggaccggctatgggcgcaactcgtatcttaccttatattaatgaggaggctgccctgaaagatgcattacgtctgtcccgcggaatgacttacaaagcagcctgcgccaatattcccgccgggggcggcaaagccgtcatcatcgctaaccccgaaaacaagaccgatgacctgttacgcgcatacggccgtttcgtggacagcttgaacggccgtttcatcaccgggcaggacgttaacattacgcccgacgacgttcgcactatttcgcaggagactaagtacgtggtaggcgtctcagaaaagtcgggagggccggcacctatcacctctctgggagtatttttaggcatcaaagccgctgtagagtcgcgttggcagtctaaacgcctggatggcatgaaagtggcggtgcaaggacttgggaacgtaggaaaaaatctttgtcgccatctgcatgaacacgatgtacaactttttgtgtctgatgtcgatccaatcaaggccgaggaagtaaaacgcttattcggggcgactgttgtcgaaccgactgaaatctattctttagatgttgatatttttgcaccgtgtgcacttgggggtattttgaatagccataccatcccgttcttacaagcctcaatcatcgcaggagcagcgaataaccagctggagaacgagcaacttcattcgcagatgcttgcgaaaaagggtattctttactcaccagactacgttatcaatgcaggaggacttatcaatgtttataacgaaatgatcggatatgacgaggaaaaagcattcaaacaagttcataacatctacgatacgttattagcgattttcgaaattgcaaaagaacaaggtgtaaccaccaacgacgcggcccgtcgtttagcagaggatcgtatcaacaactccaaacgctcaaagagtaaagcgattgcggcgtga

SEQ ID NO: 265 - DNA, 1659 bp, Artificial Sequence
  Synthetic
atgcgtacaccctactgtgtcgccgattatcttttagatcgtctgacggactgcggggccgatcacctgtttggcgtaccgggcgattacaacttgcagtttctggaccacgtcattgactcaccagatatctgctgggtagggtgtgcgaacgagcttaacgcgagctacgctgctgacggatatgcgcgttgtaaaggctttgctgcacttcttactaccttcggggtcggtgagttatcggcgatgaacggtatcgcaggctcgtacgctgagcacgtcccggtattacacattgtgggagctccgggtaccgcagctcaacagcgcggagaactgttacaccacacgctgggcgacggagaattccgccacttttaccatatgtccgagccaattactgtagcccaggctgtacttacagagcaaaatgcctgttacgagatcgaccgtgttttgaccacgatgcttcgcgagcgccgtcccgggtatttgatgctgccagccgatgttgccaaaaaagctgcgacgcccccagtgaatgccctgacgcataaacaagctcatgccgattccgcctgtttaaaggcttttcgcgatgcagctgaaaataaattagccatgtcgaaacgcaccgccttgttggcggactttctggtcctgcgccatggccttaaacacgcccttcagaaatgggtcaaagaagtcccgatggcccacgctacgatgcttatgggtaaggggatttttgatgaacgtcaagcgggattttatggaacttattccggttcggcgagtacgggggcggtaaaggaagcgattgagggagccgacacagttctttgcgtggggacacgtttcaccgatacactgaccgctggattcacacaccaacttactccggcacaaacgattgaggtgcaaccccatgcggctcgcgtgggggatgtatggtttacgggcattccaatgaatcaagccattgagactcttgtcgagctgtgcaaacagcacgtccacgcaggactgatgagttcgagctctggggcgattccttttccacaaccagatggtagtttaactcaagaaaacttctggcgcacattgcaaacctttatccgcccaggtgatatcatcttagcagaccagggtacttcagcctttggagcaattgacctgcgcttaccagcagacgtgaactttattgtgcagccgctgtgggggtctattggttatactttagctgcggccttcggagcgcagacagcgtgtccaaaccgtcgtgtgatcgtattgacaggagatggagcagcgcagttgaccattcaggagttaggctcgatgttacgcgataagcagcaccccattatcctggtcctgaacaatgaggggtatacagttgaacgcgccattcatggtgcggaacaacgctacaatgacatcgctttatggaattggacgcacatcccccaagccttatcgttagatccccaatcggaatgttggcgtgtgtctgaagcagagcaactggctgatgttctggaaaaagttgctcatcatgaacgcctgtcgttgatcgaggtaatgttgcccaaggccgatatccctccgttactgggagccttgaccaaggctttagaagcctgcaacaacgcttaa

SEQ ID NO: 266 - DNA, 1494 bp, Artificial Sequence
  Synthetic
atgcccaccttgaacttggacttacccaacggtattaagagcacgattcaggcagaccttttcatcaataataagtttgtgccggcgcttgatgggaaaacgttcgcaactattaatccgtctacggggaaagagatcggacaggtggcagaggcttcggcgaaggatgtggatcttgcagttaaggccgcgcgtgaggcgtttgaaactacttggggggaaaacacgccaggtgatgctcgtggccgtttactgattaagcttgctgagttggtggaagcgaatattgatgagttagcggcaattgaatcactggacaatgggaaagcgttctctattgctaagtcattcgacgtagctgctgtggccgcaaacttacgttactacggcggttgggctgataaaaaccacggtaaagtcatggaggtagacacaaagcgcctgaactatacccgccacgagccgatcggggtttgcggacaaatcattccgtggaatttcccgcttttgatgtttgcatggaagctgggtcccgctttagccacagggaacacaattgtgttaaagactgccgagcagactcccttaagtgctatcaagatgtgtgaattaatcgtagaagccggctttccgcccggagtagttaatgtgatctcgggattcggaccggtggcgggggccgcgatctcgcaacacatggacatcgataagattgcctttacaggatcgacattggttggccgcaacattatgaaggcagctgcgtcgactaacttaaaaaaggttacacttgagttaggaggaaaatccccgaatatcattttcaaagatgccgaccttgaccaagctgttcgctggagcgccttcggtatcatgtttaaccacggacaatgctgctgcgctggatcgcgcgtatatgtggaagaatccatctatgacgccttcatggaaaaaatgactgcgcattgtaaggcgcttcaagttggagatcctttcagcgcgaacaccttccaaggaccacaagtctcgcagttacaatacgaccgtatcatggaatacatcgaatcagggaaaaaagatgcaaatcttgctttaggcggcgttcgcaaagggaatgaggggtatttcattgagccaactatttttacagacgtgccgcacgacgcgaagattgccaaagaggagatcttcggtccagtggttgttgtgtcgaaatttaaggacgaaaaagatctgatccgtatcgcaaatgattctatttatggtttagctgcggcagtcttttcccgcgacatcagccgcgcgatcgagacagcacacaaactgaaagcaggcacggtctgggtcaactgctataatcagcttattccgcaggtgccattcggagggtataaggcttccggtatcggccgtgagttgggggaatatgccttgtctaattacacaaatatcaaggccgtccacgttaacctttctcaaccggcgcccatttga

SEQ ID NO: 267 - DNA, 6573 bp, Artificial Sequence
  Synthetic
ctctagaaataattttgtttaactttaagaaggagatatacatatgcaaacacaaaaaccgactctcgaactgctaacctgcgaaggcgcttatcgcgacaacccgactgcgctttttcaccagttgtgtggggatcgtccggcaacgctgctgctggaatccgcagatatcgacagcaaagatgatttaaaaagcctgctgctggtagacagtgcgctgcgcattacagcattaagtgacactgtcacaatccaggcgctttccggcaatggagaagccctgttgacactactggataacgccttgcctgcgggtgtggaaaatgaacaatcaccaaactgccgcgtactgcgcttcccgcctgtcagtccactgctggatgaagacgcccgcttatgctccctttcggtttttgacgctttccgcttattacagaatctgttgaatgtaccgaaggaagaacgagaagcaatgttcttcggcggcctgttctcttatgaccttgtggcgggatttgaaaatttaccgcaactgtcagcggaaaatagctgccctgatttctgtttttatctcgctgaaacgctgatggtgattgaccatcagaaaaaaagcactcgtattcaggccagcctgtttgctccgaatgaagaagaaaaacaacgtctcactgctcgcctgaacgaactacgtcagcaactgaccgaagccgcgccgccgctgccggtggtttccgtgccgcatatgcgttgtgaatgtaaccagagcgatgaagagttcggtggtgtagtgcgtttgttgcaaaaagcgattcgcgccggagaaattttccaggtggtgccatctcgccgtttctctctgccctgcccgtcaccgctggcagcctattacgtgctgaaaaagagtaatcccagcccgtacatgttttttatgcaggataatgatttcaccctgtttggcgcgtcgccggaaagttcgctcaagtatgacgccaccagccgccagattgagatttacccgattgccggaacacgtccacgcggtcgtcgtgccgatggttcgctggacagagacctcgacagccgcatcgaactggagatgcgtaccgatcataaagagctttctgaacatctgatgctggtggatctcgcccgtaatgacctggcacgcatttgcacacccggcagccgctacgtcgccgatctcaccaaagttgaccgttactcttacgtgatgcacctagtctcccgcgttgttggtgagctgcgccacgatctcgacgccctgcacgcttaccgcgcctgtatgaatatggggacgttaagcggtgcaccgaaagtacgcgctatgcagttaattgccgaagcagaaggtcgtcgacgcggcagctacggcggcgcggtaggttattttaccgcgcatggcgatctcgacacctgcattgtgatccgctcggcgctggtggaaaacggtatcgccaccgtgcaagccggtgctggcgtagtccttgattctgttccgcagtcggaagccgacgaaactcgtaataaagcccgcgctgtactgcgcgctattgccaccgcgcatcatgcacaggagacgttctaatggctgacattctgctgctcgataatatcgactcttttacgtacaacctggcagatcagttgcgcagcaatggtcataacgtggtgatttaccgcaaccatattccggcgcagaccttaattgaacgcctggcgacgatgagcaatccggtgctgatgctttctcctggccccggtgtgccgagcgaagccggttgtatgccggaactcctcacccgcttgcgtggcaagctgccaattattggcatttgcctcggacatcaggcgattgtcgaagcttacgggggctatgtcggtcaggcgggcgaaattcttcacggtaaagcgtcgagcattgaacatgacggtcaggcgatgtttgccggattaacaaacccgctgccagtggcgcgttatcactcgctggttggcagtaacattccggccggtttaaccatcaacgcccattttaatggcatggtgatggcggtgcgtcacgatgcagatcgcgtttgtggattccagttccatccggaatccattcttactacccagggcgctcgcctgctggaacaaacgctggcctgggcgcagcagaaactagagccaaccaacacgctgcaaccgattctggaaaaactgtatcaggcacagacgcttagccaacaagaaagccaccagctgttttcagcggtggtacgtggcgagctgaagccggaacaactggcggcggcgctggtgagcatgaaaattcgcggtgaacacccgaacgagatcgccggggcagcaaccgcgctactggaaaacgccgcgccattcccgcgcccggattatctgtttgccgatatcgtcggtactggcggtgacggcagcaacagcatcaatatttctaccgccagtgcgtttgtcgccgcggcctgcgggctgaaagtggcgaaacacggcaaccgtagcgtctccagtaaatccggctcgtcggatctgctggcggcgttcggtattaatcttgatatgaacgccgataaatcgcgccaggcgctggatgagttaggcgtctgtttcctctttgcgccgaagtatcacaccggattccgccatgcgatgccggttcgccagcaactgaaaacccgcactctgttcaacgtgctgggaccattgattaacccggcgcatccgccgctggcgctaattggtgtttatagtccggaactggtgctgccgattgccgaaaccttgcgcgtgctggggtatcaacgcgcggcagtggtgcacagcggcgggatggatgaagtttcattacacgcgccgacaatcgttgccgaactacatgacggcgaaattaagagctatcaattgaccgctgaagattttggcctgacaccctaccaccaggagcaattggcaggcggaacaccggaagaaaaccgtgacattttaacacgcttgttacaaggtaaaggcgacgccgcccatgaagcagccgtcgcggcgaatgtcgccatgttaatgcgcctgcatggccatgaagatctgcaagccaatgcgcaaaccgttcttgaggtactgcgcagtggttccgcttacgacagagtcaccgcactggcggcacgagggtaaatgatgcaaaccgttttagcgaaaatcgtcgcagacaaggcgatttgggtagaaacccgcaaagagcagcaaccgctggccagttttcagaatgaggttcagccgagcacgcgacatttttatgatgcacttcagggcgcacgcacggcgtttattctggagtgtaaaaaagcgtcgccgtcaaaaggcgtgatccgtgatgatttcgatccggcacgcattgccgccatttataaacattacgcttcggcaatttcagtgctgactgatgagaaatattttcaggggagctttgatttcctccccatcgtcagccaaatcgccccgcagccgattttatgtaaagacttcattatcgatccttaccagatctatctggcgcgctattaccaggccgatgcctgcttattaatgctttcagtactggatgacgaacaatatcgccagcttgcagccgtcgcccacagtctggagatgggtgtgctgaccgaagtcagtaatgaagaggaactggagcgcgccattgcattgggggcaaaggtcgttggcatcaacaaccgcgatctgcgcgatttgtcgattgatctcaaccgtacccgcgagcttgcgccgaaactggggcacaacgtgacggtaatcagcgaatccggcatcaatacttacgctcaggtgcgcgagttaagccacttcgctaacggctttctgattggttcggcgttgatggcccatgacgatttgaacgccgccgtgcgtcgggtgttgctgggtgagaataaagtatgtggcctgacacgtgggcaagatgctaaagcagcttatgacgcgggcgcgatttacggtgggttgatttttgttgcgacatcaccgcgttgcgtcaacgttgaacaggcgcaggaagtgatggctgcagcaccgttgcagtatgttggcgtgttccgcaatcacgatattgccgatgtggcggacaaagctaaggtgttatcgctggcggcagtgcaactgcatggtaatgaagatcagctgtatatcgacaatctgcgtgaggctctgccagcacacgtcgccatctggaaggctttaagtgtcggtgaaactcttcccgcgcgcgattttcagcacatcgataaatatgtattcgacaacggtcagggcgggagcggacaacgtttcgactggtcactattaaatggtcaatcgcttggcaacgttctgctggcggggggcttaggcgcagataactgcgtggaagcggcacaaaccggctgcgccgggcttgattttaattctgctgtagagtcgcaaccgggtatcaaagacgcacgtcttttggcctcggttttccagacgctgcgcgcatattaaggaaaggaacaatgacaacattacttaacccctattttggtgagtttggcggcatgtacgtgccacaaatcctgatgcctgctctgcgccagctggaagaagcttttgtcagcgcgcaaaaagatcctgaatttcaggctcagttcaacgacctgctgaaaaactatgccgggcgtccaaccgcgctgaccaaatgccagaacattacagccgggacgaacaccacgctgtatctgaagcgcgaagatttgctgcacggcggcgcgcataaaactaaccaggtgctcggtcaggctttactggcgaagcggatgggtaaaactgaaattattgccgaaaccggtgccggtcagcatggcgtggcgtcggcccttgccagcgccctgctcggcctgaaatgccgaatttatatgggtgccaaagacgttgaacgccagtcgcccaacgttttccggatgcgcttaatgggtgcggaagtgatcccggtacatagcggttccgcgaccctgaaagatgcctgtaatgaggcgctacgcgactggtccggcagttatgaaaccgcgcactatatgctgggtaccgcagctggcccgcatccttacccgaccattgtgcgtgagtttcagcggatgattggcgaagaaacgaaagcgcagattctggaaagagaaggtcgcctgccggatgccgttatcgcctgtgttggcggtggttcgaatgccatcggtatgtttgcagatttcatcaacgaaaccgacgtcggcctgattggtgtggagcctggcggccacggtatcgaaactggcgagcacggcgcaccgttaaaacatggtcgcgtgggcatctatttcggtatgaaagcgccgatgatgcaaaccgaagacgggcaaattgaagagtcttactccatttctgccgggctggatttcccgtccgtcggcccgcaacatgcgtatctcaacagcactggacgcgctgattacgtgtctattaccgacgatgaagccctggaagcctttaaaacgctttgcctgcatgaagggatcatcccggcgctggaatcctcccacgccctggcccatgcgctgaaaatgatgcgcgaaaatccggaaaaagagcagctactggtggttaacctttccggtcgcggcgataaagacatcttcaccgttcacgatattttgaaagcacgaggggaaatctgatggaacgctacgaatctctgtttgcccagttgaaggagcgcaaagaaggcgcattcgttcctttcgtcaccctcggtgatccgggcattgagcagtcgttgaaaattatcgatacgctaattgaagccggtgctgacgcgctggagttaggcatccccttctccgacccactggcggatggcccgacgattcaaaacgccacactgcgtgcttttgcggcgggagtaaccccggcgcagtgctttgagatgctggcactcattcgccagaagcacccgaccattcccatcggccttttgatgtatgccaacctggtgtttaacaaaggcattgatgagttttatgccgagtgcgagaaagtcggcgtcgattcggtgctggttgccgatgtgcccgtggaagagtccgcgcccttccgccaggccgcgttgcgtcataatgtcgcacctatctttatttgcccgccgaatgccgacgatgatttgctgcgccagatagcctcttacggtcgtggttacacctatttgctgtcgcgagcgggcgtgaccggcgcagaaaaccgcgccgcgttacccctcaatcatctggttgcgaagctgaaagagtacaacgctgcgcctccattgcagggatttggtatttccgccccggatcaggtaaaagccgcgattgatgcaggagctgcgggcgcgatttctggttcggccatcgttaaaatcatcgagcaacatattaatgagccagagaaaatgctggcggcactgaaagcttttgtacaaccgatgaaagcggcgacgcgcagtta

SEQ ID NO: 268-272 - skipped (5 entries)

SEQ ID NO: 273 - DNA, 6574 bp, Artificial Sequence
  Synthetic
ctctagaaataattttgtttaactttaagaaggagatatacatatgcaaacacaaaaaccgactctcgaactgctaacctgcgaaggcgcttatcgcgacaacccgactgcgctttttcaccagttgtgtggggatcgtccggcaacgctgctgctggaattcgcagatatcgacagcaaagatgatttaaaaagcctgctgctggtagacagtgcgctgcgcattacagcattaagtgacactgtcacaatccaggcgctttccggcaatggagaagccctgttgacactactggataacgccttgcctgcgggtgtggaaaatgaacaatcaccaaactgccgcgtactgcgcttcccgcctgtcagtccactgctggatgaagacgcccgcttatgctccctttcggtttttgacgctttccgcttattacagaatctgttgaatgtaccgaaggaagaacgagaagcaatgttcttcggcggcctgttctcttatgaccttgtggcgggatttgaaaatttaccgcaactgtcagcggaaaatagctgccctgatttctgtttttatctcgctgaaacgctgatggtgattgaccatcagaaaaaaagcactcgtattcaggccagcctgtttgctccgaatgaagaagaaaaacaacgtctcactgctcgcctgaacgaactacgtcagcaactgaccgaagccgcgccgccgctgccggtggtttccgtgccgcatatgcgttgtgaatgtaaccagagcgatgaagagttcggtggtgtagtgcgtttgttgcaaaaagcgattcgcgccggagaaattttccaggtggtgccatctcgccgtttctctctgccctgcccgtcaccgctggcagcctattacgtgctgaaaaagagtaatcccagcccgtacatgttttttatgcaggataatgatttcaccctgtttggcgcgtcgccggaaagttcgctcaagtatgacgccaccagccgccagattgagatttacccgattgccggaacacgtccacgcggtcgtcgtgccgatggttcgctggacagagacctcgacagccgcatcgaactggagatgcgtaccgatcataaagagctttctgaacatctgatgctggtggatctcgcccgtaatgacctggcacgcatttgcacacccggcagccgctacgtcgccgatctcaccaaagttgaccgttactcttacgtgatgcacctagtctcccgcgttgttggtgagctgcgccacgatctcgacgccctgcacgcttaccgcgcctgtatgaatatggggacgttaagcggtgcaccgaaagtacgcgctatgcagttaattgccgaagcagaaggtcgtcgacgcggcagctacggcggcgcggtaggttattttaccgcgcatggcgatctcgacacctgcattgtgatccgctcggcgctggtggaaaacggtatcgccaccgtgcaagccggtgctggcgtagtccttgattctgttccgcagtcggaagccgacgaaactcgtaataaagcccgcgctgtactgcgcgctattgccaccgcgcatcatgcacaggagacgttctaatggctgacattctgctgctcgataatatcgactcttttacgtacaacctggcagatcagttgcgcagcaatggtcataacgtggtgatttaccgcaaccatattccggcgcagaccttaattgaacgcctggcgacgatgagcaatccggtgctgatgctttctcctggccccggtgtgccgagcgaagccggttgtatgccggaactcctcacccgcttgcgtggcaagctgccaattattggcatttgcctcggacatcaggcgattgtcgaagcttacgggggctatgtcggtcaggcgggcgaaattcttcacggtaaagcgtcgagcattgaacatgacggtcaggcgatgtttgccggattaacaaacccgctgccagtggcgcgttatcactcgctggttggcagtaacattccggccggtttaaccatcaacgcccattttaatggcatggtgatggcggtgcgtcacgatgcagatcgcgtttgtggattccagttccatccggaatccattcttactacccagggcgctcgcctgctggaacaaacgctggcctgggcgcagcagaaactagagccaaccaacacgctgcaaccgattctggaaaaactgtatcaggcacagacgcttagccaacaagaaagccaccagctgttttcagcggtggtacgtggcgagctgaagccggaacaactggcggcggcgctggtgagcatgaaaattcgcggtgaacacccgaacgagatcgccggggcagcaaccgcgctactggaaaacgccgcgccattcccgcgcccggattatctgtttgccgatatcgtcggtactggcggtgacggcagcaacagcatcaatatttctaccgccagtgcgtttgtcgccgcggcctgcgggctgaaagtggcgaaacacggcaaccgtagcgtctccagtaaatccggctcgtcggatctgctggcggcgttcggtattaatcttgatatgaacgccgataaatcgcgccaggcgctggatgagttaggcgtctgtttcctctttgcgccgaagtatcacaccggattccgccatgcgatgccggttcgccagcaactgaaaacccgcactctgttcaacgtgctgggaccattgattaacccggcgcatccgccgctggcgctaattggtgtttatagtccggaactggtgctgccgattgccgaaaccttgcgcgtgctggggtatcaacgcgcggcagtggtgcacagcggcgggatggatgaagtttcattacacgcgccgacaatcgttgccgaactacatgacggcgaaattaagagctatcaattgaccgctgaagattttggcctgacaccctaccaccaggagcaattggcaggcggaacaccggaagaaaaccgtgacattttaacacgcttgttacaaggtaaaggcgacgccgcccatgaagcagccgtcgcggcgaatgtcgccatgttaatgcgcctgcatggccatgaagatctgcaagccaatgcgcaaaccgttcttgaggtactgcgcagtggttccgcttacgacagagtcaccgcactggcggcacgagggtaaatgatgcaaaccgttttagcgaaaatcgtcgcagacaaggcgatttgggtagaaacccgcaaagagcagcaaccgctggccagttttcagaatgaggttcagccgagcacgcgacatttttatgatgcacttcagggcgcacgcacggcgtttattctggagtgtaaaaaagcgtcgccgtcaaaaggcgtgatccgtgatgatttcgatccggcacgcattgccgccatttataaacattacgcttcggcaatttcagtgctgactgatgagaaatattttcaggggagctttgatttcctccccatcgtcagccaaatcgccccgcagccgattttatgtaaagacttcattatcgatccttaccagatctatctggcgcgctattaccaggccgatgcctgcttattaatgctttcagtactggatgacgaacaatatcgccagcttgcagccgtcgcccacagtctggagatgggtgtgctgaccgaagtcagtaatgaagaggaactggagcgcgccattgcattgggggcaaaggtcgttggcatcaacaaccgcgatctgcgcgatttgtcgattgatctcaaccgtacccgcgagcttgcgccgaaactggggcacaacgtgacggtaatcagcgaatccggcatcaatacttacgctcaggtgcgcgagttaagccacttcgctaacggctttctgattggttcggcgttgatggcccatgacgatttgaacgccgccgtgcgtcgggtgttgctgggtgagaataaagtatgtggcctgacacgtgggcaagatgctaaagcagcttatgacgcgggcgcgatttacggtgggttgatttttgttgcgacatcaccgcgttgcgtcaacgttgaacaggcgcaggaagtgatggctgcagcaccgttgcagtatgttggcgtgttccgcaatcacgatattgccgatgtggcggacaaagctaaggtgttatcgctggcggcagtgcaactgcatggtaatgaagatcagctgtatatcgacaatctgcgtgaggctctgccagcacacgtcgccatctggaaggctttaagtgtcggtgaaactcttcccgcgcgcgattttcagcacatcgataaatatgtattcgacaacggtcagggcgggagcggacaacgtttcgactggtcactattaaatggtcaatcgcttggcaacgttctgctggcggggggcttaggcgcagataactgcgtggaagcggcacaaaccggctgcgccgggcttgattttaattctgctgtagagtcgcaaccgggtatcaaagacgcacgtcttttggcctcggttttccagacgctgcgcgcatattaaggaaaggaacaatgacaacattacttaacccctattttggtgagtttggcggcatgtacgtgccacaaatcctgatgcctgctctgcgccagctggaagaagcttttgtcagcgcgcaaaaagatcctgaatttcaggctcagttcaacgacctgctgaaaaactatgccgggcgtccaaccgcgctgaccaaatgccagaacattacagccgggacgaacaccacgctgtatctgaagcgcgaagatttgctgcacggcggcgcgcataaaactaaccaggtgctcggtcaggctttactggcgaagcggatgggtaaaactgaaattattgccgaaaccggtgccggtcagcatggcgtggcgtcggcccttgccagcgccctgctcggcctgaaatgccgaatttatatgggtgccaaagacgttgaacgccagtcgcccaacgttttccggatgcgcttaatgggtgcggaagtgatcccggtacatagcggttccgcgaccctgaaagatgcctgtaatgaggcgctacgcgactggtccggcagttatgaaaccgcgcactatatgctgggtaccgcagctggcccgcatccttacccgaccattgtgcgtgagtttcagcggatgattggcgaagaaacgaaagcgcagattctggaaagagaaggtcgcctgccggatgccgttatcgcctgtgttggcggtggttcgaatgccatcggtatgtttgcagatttcatcaacgaaaccgacgtcggcctgattggtgtggagcctggcggccacggtatcgaaactggcgagcacggcgcaccgttaaaacatggtcgcgtgggcatctatttcggtatgaaagcgccgatgatgcaaaccgaagacgggcaaattgaagagtcttactccatttctgccgggctggatttcccgtccgtcggcccgcaacatgcgtatctcaacagcactggacgcgctgattacgtgtctattaccgacgatgaagccctggaagcctttaaaacgctttgcctgcatgaagggatcatcccggcgctggaatcctcccacgccctggcccatgcgctgaaaatgatgcgcgaaaatccggaaaaagagcagctactggtggttaacctttccggtcgcggcgataaagacatcttcaccgttcacgatattttgaaagcacgaggggaaatctgatggaacgctacgaatctctgtttgcccagttgaaggagcgcaaagaaggcgcattcgttcctttcgtcaccctcggtgatccgggcattgagcagtcgttgaaaattatcgatacgctaattgaagccggtgctgacgcgctggagttaggcatccccttctccgacccactggcggatggcccgacgattcaaaacgccacactgcgtgcttttgcggcgggagtaaccccggcgcagtgctttgagatgctggcactcattcgccagaagcacccgaccattcccatcggccttttgatgtatgccaacctggtgtttaacaaaggcattgatgagttttatgccgagtgcgagaaagtcggcgtcgattcggtgctggttgccgatgtgcccgtggaagagtccgcgcccttccgccaggccgcgttgcgtcataatgtcgcacctatctttatttgcccgccgaatgccgacgatgatttgctgcgccagatagcctcttacggtcgtggttacacctatttgctgtcgcgagcgggcgtgaccggcgcagaaaaccgcgccgcgttacccctcaatcatctggttgcgaagctgaaagagtacaacgctgcgcctccattgcagggatttggtatttccgccccggatcaggtaaaagccgcgattgatgcaggagctgcgggcgcgatttctggttcggccatcgttaaaatcatcgagcaacatattaatgagccagagaaaatgctggcggcactgaaagcttttgtacaaccgatgaaagcggcgacgcgcagttaa

SEQ ID NO: 274 - DNA, 1562 bp, Artificial Sequence
  Synthetic
atgcaaacacaaaaaccgactctcgaactgctaacctgcgaaggcgcttatcgcgacaacccgactgcgctttttcaccagttgtgtggggatcgtccggcaacgctgctgctggaattcgcagatatcgacagcaaagatgatttaaaaagcctgctgctggtagacagtgcgctgcgcattacagcattaagtgacactgtcacaatccaggcgctttccggcaatggagaagccctgttgacactactggataacgccttgcctgcgggtgtggaaaatgaacaatcaccaaactgccgcgtactgcgcttcccgcctgtcagtccactgctggatgaagacgcccgcttatgctccctttcggtttttgacgctttccgcttattacagaatctgttgaatgtaccgaaggaagaacgagaagcaatgttcttcggcggcctgttctcttatgaccttgtggcgggatttgaaaatttaccgcaactgtcagcggaaaatagctgccctgatttctgtttttatctcgctgaaacgctgatggtgattgaccatcagaaaaaaagcactcgtattcaggccagcctgtttgctccgaatgaagaagaaaaacaacgtctcactgctcgcctgaacgaactacgtcagcaactgaccgaagccgcgccgccgctgccggtggtttccgtgccgcatatgcgttgtgaatgtaaccagagcgatgaagagttcggtggtgtagtgcgtttgttgcaaaaagcgattcgcgccggagaaattttccaggtggtgccatctcgccgtttctctctgccctgcccgtcaccgctggcagcctattacgtgctgaaaaagagtaatcccagcccgtacatgttttttatgcaggataatgatttcaccctgtttggcgcgtcgccggaaagttcgctcaagtatgacgccaccagccgccagattgagatttacccgattgccggaacacgtccacgcggtcgtcgtgccgatggttcgctggacagagacctcgacagccgcatcgaactggagatgcgtaccgatcataaagagctttctgaacatctgatgctggtggatctcgcccgtaatgacctggcacgcatttgcacacccggcagccgctacgtcgccgatctcaccaaagttgaccgttactcttacgtgatgcacctagtctcccgcgttgttggtgagctgcgccacgatctcgacgccctgcacgcttaccgcgcctgtatgaatatggggacgttaagcggtgcaccgaaagtacgcgctatgcagttaattgccgaagcagaaggtcgtcgacgcggcagctacggcggcgcggtaggttattttaccgcgcatggcgatctcgacacctgcattgtgatccgctcggcgctggtggaaaacggtatcgccaccgtgcaagccggtgctggcgtagtccttgattctgttccgcagtcggaagccgacgaaactcgtaataaagcccgcgctgtactgcgcgctattgccaccgcgcatcatgcacaggagacgttcta

SEQ ID NO: 275 - DNA, 7615 bp, Artificial Sequence
  Synthetic
ctctagaaataattttgtttaactttaagaaggagatatacatatgaattatcagaacgacgatttacgcatcaaagaaatcaaagagttacttcctcctgtcgcattgctggaaaaattccccgctactgaaaatgccgcgaatacggtcgcccatgcccgaaaagcgatccataagatcctgaaaggtaatgatgatcgcctgttggtggtgattggcccatgctcaattcatgatcctgtcgcggctaaagagtatgccactcgcttgctgacgctgcgtgaagagctgcaagatgagctggaaatcgtgatgcgcgtctattttgaaaagccgcgtactacggtgggctggaaagggctgattaacgatccgcatatggataacagcttccagatcaacgacggtctgcgtattgcccgcaaattgctgctcgatattaacgacagcggtctgccagcggcgggtgaattcctggatatgatcaccctacaatatctcgctgacctgatgagctggggcgcaattggcgcacgtaccaccgaatcgcaggtgcaccgcgaactggcgtctggtctttcttgtccggtaggtttcaaaaatggcactgatggtacgattaaagtggctatcgatgccattaatgccgccggtgcgccgcactgcttcctgtccgtaacgaaatgggggcattcggcgattgtgaataccagcggtaacggcgattgccatatcattctgcgcggcggtaaagagcctaactacagcgcgaagcacgttgctgaagtgaaagaagggctgaacaaagcaggcctgccagcgcaggtgatgatcgatttcagccatgctaactcgtcaaaacaattcaaaaagcagatggatgtttgtactgacgtttgccagcagattgccggtggcgaaaaggccattattggcgtgatggtggaaagccatctggtggaaggcaatcagagcctcgagagcggggaaccgctggcctacggtaagagcatcaccgatgcctgcattggctgggatgataccgatgctctgttacgtcaactggcgagtgcagtaaaagcgcgtcgcgggtaatacttaagaaggagatatacatatgctgttattcgagactgtgcgtgaaatgggtcatgagcaagtccttttctgtcatagcaagaatcccgagatcaaggcaattatcgcaatccacgataccaccttaggaccggctatgggcgcaactcgtatcttaccttatattaatgaggaggctgccctgaaagatgcattacgtctgtcccgcggaatgacttacaaagcagcctgcgccaatattcccgccgggggcggcaaagccgtcatcatcgctaaccccgaaaacaagaccgatgacctgttacgcgcatacggccgtttcgtggacagcttgaacggccgtttcatcaccgggcaggacgttaacattacgcccgacgacgttcgcactatttcgcaggagactaagtacgtggtaggcgtctcagaaaagtcgggagggccggcacctatcacctctctgggagtatttttaggcatcaaagccgctgtagagtcgcgttggcagtctaaacgcctggatggcatgaaagtggcggtgcaaggacttgggaacgtaggaaaaaatctttgtcgccatctgcatgaacacgatgtacaactttttgtgtctgatgtcgatccaatcaaggccgaggaagtaaaacgcttattcggggcgactgttgtcgaaccgactgaaatctattctttagatgttgatatttttgcaccgtgtgcacttgggggtattttgaatagccataccatcccgttcttacaagcctcaatcatcgcaggagcagcgaataaccagctggagaacgagcaacttcattcgcagatgcttgcgaaaaagggtattctttactcaccagactacgttatcaatgcaggaggacttatcaatgtttataacgaaatgatcggatatgacgaggaaaaagcattcaaacaagttcataacatctacgatacgttattagcgattttcgaaattgcaaaagaacaaggtgtaaccaccaacgacgcggcccgtcgtttagcagaggatcgtatcaacaactccaaacgctcaaagagtaaagcgattgcggcgtgaaatgtaagaaggagatatacatatggaaaacaacaccaatatgttctctggagtgaaggtgatcgaactggccaactttatcgctgctccggcggcaggtcgcttctttgctgatgggggagcagaagtaattaagatcgaatctccagcaggcgacccgctgcgctacacggccccatcagaaggacgcccgctttctcaagaggaaaacacaacgtatgatttggaaaacgcgaataagaaagcaattgttctgaacttaaaatcggaaaaaggaaagaaaattcttcacgagatgcttgctgaggcagacatcttgttaacaaattggcgcacgaaagcgttagtcaaacaggggttagattacgaaacactgaaagagaagtatccaaaattggtatttgcacagattacaggatacggggagaaaggacccgacaaagacctgcctggtttcgactacacggcgtttttcgcccgcggaggagtctccggtacattatatgaaaaaggaactgtccctcctaatgtggtaccgggtctgggtgaccaccaggcaggaatgttcttagctgccggtatggctggtgcgttgtataaggccaaaaccaccggacaaggcgacaaagtcaccgttagtctgatgcatagcgcaatgtacggcctgggaatcatgattcaggcagcccagtacaaggaccatgggctggtgtacccgatcaaccgtaatgaaacgcctaatcctttcatcgtttcatacaagtccaaagatgattactttgtccaagtttgcatgcctccctatgatgtgttttatgatcgctttatgacggccttaggacgtgaagacttggtaggtgacgaacgctacaataagatcgagaacttgaaggatggtcgcgcaaaagaagtctattccatcatcgaacaacaaatggtaacgaagacgaaggacgaatgggacaagatttttcgtgatgcagacattccattcgctattgcccaaacgtgggaagatcttttagaagacgagcaggcatgggccaacgactacctgtataaaatgaagtatcccacaggcaacgaacgtgccctggtacgtttacctgtgttcttcaaagaagctggacttcctgaatacaaccagtcgccacagattgctgagaataccgtggaagtgttaaaggagatgggatataccgagcaagaaattgaggagcttgagaaagacaaagacatcatggtacgtaaagagaaatgaaggttaagaaggagatatacatatgtcagaccgcaacaaagaagtgaaagaaaagaaggctaaacactatctgcgcgagatcacagctaaacactacaaggaagcgttagaggctaaagagcgtggggagaaagtgggttggtgtgcctctaacttcccccaagagattgcaaccacgttgggtgtaaaggttgtttatcccgaaaaccacgccgccgccgtagcggcacgtggcaatgggcaaaatatgtgcgaacacgcggaggctatgggattcagtaatgatgtgtgtggatatgcacgtgtaaatttagccgtaatggacatcggccatagtgaagatcaacctattccaatgcctgatttcgttctgtgctgtaataatatctgcaatcagatgattaaatggtatgaacacattgcaaaaacgttggatattcctatgatccttatcgatattccatataatactgagaacacggtgtctcaggaccgcattaagtacatccgcgcccagttcgatgacgctatcaagcaactggaagaaatcactggcaaaaagtgggacgagaataaattcgaagaagtgatgaagatttcgcaagaatcggccaagcaatggttacgcgccgcgagctacgcgaaatacaaaccatcaccgttttcgggctttgacctttttaatcacatggctgtagccgtttgtgctcgcggcacccaggaagccgccgatgcattcaaaatgttagcagatgaatatgaagagaacgttaagacaggaaagtctacttatcgcggcgaggagaagcagcgtatcttgttcgagggcatcgcttgttggccttatctgcgccacaagttgacgaaactgagtgaatatggaatgaacgtcacagctacggtgtacgccgaagcttttggggttatttacgaaaacatggatgaactgatggccgcttacaataaagtgcctaactcaatctccttcgagaacgcgctgaagatgcgtcttaatgccgttacaagcaccaatacagaaggggctgttatccacattaatcgcagttgtaagctgtggtcaggattcttatacgaactggcccgtcgtttggaaaaggagacggggatccctgttgtttcgttcgacggagatcaagcggatccccgtaacttctccgaggctcaatatgacactcgcatccaaggtttaaatgaggtgatggtcgcgaaaaaagaagcagagtgagctttaagaaggagatatacatatgtcgaatagtgacaagttttttaacgacttcaaggacattgtggaaaacccaaagaagtatatcatgaagcatatggaacaaacgggacaaaaagccatcggttgcatgcctttatacaccccagaagagcttgtcttagcggcgggtatgtttcctgttggagtatggggctcgaatactgagttgtcaaaagccaagacctactttccggcttttatctgttctatcttgcaaactactttagaaaacgcattgaatggggagtatgacatgctgtctggtatgatgatcacaaactattgcgattcgctgaaatgtatgggacaaaacttcaaacttacagtggaaaatatcgaattcatcccggttacggttccacaaaaccgcaagatggaggcgggtaaagaatttctgaaatcccagtataaaatgaatatcgaacaactggaaaaaatctcagggaataagatcactgacgagagcttggagaaggctattgaaatttacgatgagcaccgtaaagtcatgaacgatttctctatgcttgcgtccaagtaccctggtatcattacgccaacgaaacgtaactacgtgatgaagtcagcgtattatatggacaagaaagaacatacagagaaggtacgtcagttgatggatgaaatcaaggccattgagcctaaaccattcgaaggaaaacgcgtgattaccactgggatcattgcagattcggaggaccttttgaaaatcttggaggagaataacattgctatcgtgggagatgatattgcacacgagtctcgccaataccgcactttgaccccggaggccaacacacctatggaccgtcttgctgaacaatttgcgaaccgcgagtgttcgacgttgtatgaccctgaaaaaaaacgtggacagtatattgtcgagatggcaaaagagcgtaaggccgacggaatcatcttcttcatgacaaaattctgcgatcccgaagaatacgattaccctcagatgaaaaaagacttcgaagaagccggtattccccacgttctgattgagacagacatgcaaatgaagaactacgaacaagctcgcaccgctattcaagcattttcagaaaccctttgacgcttaagaaggagatatacatatgcgtgctgtcttaatcgagaagtcagatgacacccagagtgtttcagttacggagttggctgaagaccaattacccgaaggtgacgtccttgtggatgtcgcgtacagcacattgaattacaaggatgctcttgcgattactggaaaagcacccgttgtacgccgttttcctatggtccccggaattgactttactgggactgtcgcacagagttcccatgctgatttcaagccaggcgaccgcgtaattctgaacggatggggagttggtgagaaacactggggcggtcttgcagaacgcgcacgcgtacgtggggactggcttgtcccgttgccagcccccttagacttgcgccaggctgcaatgattggcactgcggggtacacagctatgctgtgcgtgcttgcccttgagcgccatggagtcgtacctgggaacggcgagattgtcgtctcaggcgcagcaggaggggtaggttctgtagcaaccacactgttagcagccaaaggctacgaagtggccgccgtgaccgggcgcgcaagcgaggccgaatatttacgcggattaggcgccgcgtcggtcattgatcgcaatgaattaacggggaaggtgcgtccattagggcaggaacgctgggcaggaggaatcgatgtagcaggatcaaccgtacttgctaatatgttgagcatgatgaaataccgtggcgtggtggcggcctgtggcctggcggctggaatggacttgcccgcgtctgtcgccccttttattctgcgtggtatgactttggcaggggtagattcagtcatgtgccccaaaactgatcgtctggctgcttgggcacgcctggcatccgacctggaccctgcaaagctggaagagatgacaactgaattaccgttctctgaggtgattgaaacggctccgaagttcttggatggaacagtgcgtgggcgtattgtcattccggtaacaccttgatacttaagaaggagatatacatatgaaaatcttggcatactgcgtccgcccagacgaggtagactcctttaagaaatttagtgaaaagtacgggcatacagttgatcttattccagactcttttggacctaatgtcgctcatttggcgaagggttacgatgggatttctattctgggcaacgacacgtgtaaccgtgaggcactggagaagatcaaggattgcgggatcaaatatctggcaacccgtacagccggagtgaacaacattgacttcgatgcagcaaaggagttcggtattaacgtggctaatgttcccgcatattcccccaactcggtcagcgaatttaccattggattggcattaagtctgacgcgtaagattccatttgccctgaaacgcgtggaactgaacaattttgcgcttggcggccttattggtgtggaattgcgtaacttaactttaggagtcatcggtactggtcgcatcggattgaaagtgattgagggcttctctgggtttggaatgaaaaaaatgatcggttatgacatttttgaaaatgaagaagcaaagaagtacatcgaatacaaatcattagacgaagtttttaaagaggctgatattatcactctgcatgcgcctctgacagacgacaactatcatatgattggtaaagaatccattgctaaaatgaaggatggggtatttattatcaacgcagcgcgtggagccttaatcgatagtgaggccctgattgaagggttaaaatcggggaagatt

SEQ ID NO: 276 - DNA, 1239 bp, Artificial Sequence
  Synthetic
atggaaaacaacaccaatatgttctctggagtgaaggtgatcgaactggccaactttatcgctgctccggcggcaggtcgcttctttgctgatgggggagcagaagtaattaagatcgaatctccagcaggcgacccgctgcgctacacggccccatcagaaggacgcccgctttctcaagaggaaaacacaacgtatgatttggaaaacgcgaataagaaagcaattgttctgaacttaaaatcggaaaaaggaaagaaaattcttcacgagatgcttgctgaggcagacatcttgttaacaaattggcgcacgaaagcgttagtcaaacaggggttagattacgaaacactgaaagagaagtatccaaaattggtatttgcacagattacaggatacggggagaaaggacccgacaaagacctgcctggtttcgactacacggcgtttttcgcccgcggaggagtctccggtacattatatgaaaaaggaactgtccctcctaatgtggtaccgggtctgggtgaccaccaggcaggaatgttcttagctgccggtatggctggtgcgttgtataaggccaaaaccaccggacaaggcgacaaagtcaccgttagtctgatgcatagcgcaatgtacggcctgggaatcatgattcaggcagcccagtacaaggaccatgggctggtgtacccgatcaaccgtaatgaaacgcctaatcctttcatcgtttcatacaagtccaaagatgattactttgtccaagtttgcatgcctccctatgatgtgttttatgatcgctttatgacggccttaggacgtgaagacttggtaggtgacgaacgctacaataagatcgagaacttgaaggatggtcgcgcaaaagaagtctattccatcatcgaacaacaaatggtaacgaagacgaaggacgaatgggacaagatttttcgtgatgcagacattccattcgctattgcccaaacgtgggaagatcttttagaagacgagcaggcatgggccaacgactacctgtataaaatgaagtatcccacaggcaacgaacgtgccctggtacgtttacctgtgttcttcaaagaagctggacttcctgaatacaaccagtcgccacagattgctgagaataccgtggaagtgttaaaggagatgggatataccgagcaagaaattgaggagcttgagaaagacaaagacatcatggtacgtaaagagaaatga

SEQ ID NO: 277 - DNA, 1224 bp, Artificial Sequence
  Synthetic
atgtcagaccgcaacaaagaagtgaaagaaaagaaggctaaacactatctgcgcgagatcacagctaaacactacaaggaagcgttagaggctaaagagcgtggggagaaagtgggttggtgtgcctctaacttcccccaagagattgcaaccacgttgggtgtaaaggttgtttatcccgaaaaccacgccgccgccgtagcggcacgtggcaatgggcaaaatatgtgcgaacacgcggaggctatgggattcagtaatgatgtgtgtggatatgcacgtgtaaatttagccgtaatggacatcggccatagtgaagatcaacctattccaatgcctgatttcgttctgtgctgtaataatatctgcaatcagatgattaaatggtatgaacacattgcaaaaacgttggatattcctatgatccttatcgatattccatataatactgagaacacggtgtctcaggaccgcattaagtacatccgcgcccagttcgatgacgctatcaagcaactggaagaaatcactggcaaaaagtgggacgagaataaattcgaagaagtgatgaagatttcgcaagaatcggccaagcaatggttacgcgccgcgagctacgcgaaatacaaaccatcaccgttttcgggctttgacctttttaatcacatggctgtagccgtttgtgctcgcggcacccaggaagccgccgatgcattcaaaatgttagcagatgaatatgaagagaacgttaagacaggaaagtctacttatcgcggcgaggagaagcagcgtatcttgttcgagggcatcgcttgttggccttatctgcgccacaagttgacgaaactgagtgaatatggaatgaacgtcacagctacggtgtacgccgaagcttttggggttatttacgaaaacatggatgaactgatggccgcttacaataaagtgcctaactcaatctccttcgagaacgcgctgaagatgcgtcttaatgccgttacaagcaccaatacagaaggggctgttatccacattaatcgcagttgtaagctgtggtcaggattcttatacgaactggcccgtcgtttggaaaaggagacggggatccctgttgtttcgttcgacggagatcaagcggatccccgtaacttctccgaggctcaatatgacactcgcatccaaggtttaaatgaggtgatggtcgcgaaaaaagaagcagagtga

SEQ ID NO: 278 - DNA, 1124 bp, Artificial Sequence
  Synthetic
atgtcgaatagtgacaagttttttaacgacttcaaggacattgtggaaaacccaaagaagtatatcatgaagcatatggaacaaacgggacaaaaagccatcggttgcatgcctttatacaccccagaagagcttgtcttagcggcgggtatgtttcctgttggagtatggggctcgaatactgagttgtcaaaagccaagacctactttccggcttttatctgttctatcttgcaaactactttagaaaacgcattgaatggggagtatgacatgctgtctggtatgatgatcacaaactattgcgattcgctgaaatgtatgggacaaaacttcaaacttacagtggaaaatatcgaattcatcccggttacggttccacaaaaccgcaagatggaggcgggtaaagaatttctgaaatcccagtataaaatgaatatcgaacaactggaaaaaatctcagggaataagatcactgacgagagcttggagaaggctattgaaatttacgatgagcaccgtaaagtcatgaacgatttctctatgcttgcgtccaagtaccctggtatcattacgccaacgaaacgtaactacgtgatgaagtcagcgtattatatggacaagaaagaacatacagagaaggtacgtcagttgatggatgaaatcaaggccattgagcctaaaccattcgaaggaaaacgcgtgattaccactgggatcattgcagattcggaggaccttttgaaaatcttggaggagaataacattgctatcgtgggagatgatattgcacacgagtctcgccaataccgcactttgaccccggaggccaacacacctatggaccgtcttgctgaacaatttgcgaaccgcgagtgttcgacgttgtatgaccctgaaaaaaaacgtggacagtatattgtcgagatggcaaaagagcgtaaggccgacggaatcatcttcttcatgacaaaattctgcgatcccgaagaatacgattaccctcagatgaaaaaagacttcgaagaagccggtattccccacgttctgattgagacagacatgcaaatgaagaactacgaacaagctcgcaccgctattcaagcattttcagaaaccctttg

SEQ ID NO: 279 - DNA, 981 bp, Artificial Sequence
  Synthetic
atgcgtgctgtcttaatcgagaagtcagatgacacccagagtgtttcagttacggagttggctgaagaccaattacccgaaggtgacgtccttgtggatgtcgcgtacagcacattgaattacaaggatgctcttgcgattactggaaaagcacccgttgtacgccgttttcctatggtccccggaattgactttactgggactgtcgcacagagttcccatgctgatttcaagccaggcgaccgcgtaattctgaacggatggggagttggtgagaaacactggggcggtcttgcagaacgcgcacgcgtacgtggggactggcttgtcccgttgccagcccccttagacttgcgccaggctgcaatgattggcactgcggggtacacagctatgctgtgcgtgcttgcccttgagcgccatggagtcgtacctgggaacggcgagattgtcgtctcaggcgcagcaggaggggtaggttctgtagcaaccacactgttagcagccaaaggctacgaagtggccgccgtgaccgggcgcgcaagcgaggccgaatatttacgcggattaggcgccgcgtcggtcattgatcgcaatgaattaacggggaaggtgcgtccattagggcaggaacgctgggcaggaggaatcgatgtagcaggatcaaccgtacttgctaatatgttgagcatgatgaaataccgtggcgtggtggcggcctgtggcctggcggctggaatggacttgcccgcgtctgtcgccccttttattctgcgtggtatgactttggcaggggtagattcagtcatgtgccccaaaactgatcgtctggctgcttgggcacgcctggcatccgacctggaccctgcaaagctggaagagatgacaactgaattaccgttctctgaggtgattgaaacggctccgaagttcttggatggaacagtgcgtgggcgtattgtcattccggtaacaccttga

SEQ ID NO: 280 - DNA, 996 bp, Artificial Sequence
  Synthetic
atgaaaatcttggcatactgcgtccgcccagacgaggtagactcctttaagaaatttagtgaaaagtacgggcatacagttgatcttattccagactcttttggacctaatgtcgctcatttggcgaagggttacgatgggatttctattctgggcaacgacacgtgtaaccgtgaggcactggagaagatcaaggattgcgggatcaaatatctggcaacccgtacagccggagtgaacaacattgacttcgatgcagcaaaggagttcggtattaacgtggctaatgttcccgcatattcccccaactcggtcagcgaatttaccattggattggcattaagtctgacgcgtaagattccatttgccctgaaacgcgtggaactgaacaattttgcgcttggcggccttattggtgtggaattgcgtaacttaactttaggagtcatcggtactggtcgcatcggattgaaagtgattgagggcttctctgggtttggaatgaaaaaaatgatcggttatgacatttttgaaaatgaagaagcaaagaagtacatcgaatacaaatcattagacgaagtttttaaagaggctgatattatcactctgcatgcgcctctgacagacgacaactatcatatgattggtaaagaatccattgctaaaatgaaggatggggtatttattatcaacgcagcgcgtggagccttaatcgatagtgaggccctgattgaagggttaaaatcggggaagattgcgggcgcggctctggatagctatgagtatgagcaaggtgtctttcacaacaataagatgaatgaaattatgcaggatgataccttggaacgtctgaaatcttttcccaacgtcgtgatcacgccgcatttgggtttttatactgatgaggcggtttccaatatggtagagatcacactgatgaaccttcaggaattcgagttgaaaggaacctgtaagaaccagcgtgtttgtaaatga

SEQ ID NO: 281 - DNA, 8008 bp, Artificial Sequence
  Synthetic
ctctagaaataattttgtttaactttaagaaggagatatacatatgaattatcagaacgacgatttacgcatcaaagaaatcaaagagttacttcctcctgtcgcattgctggaaaaattccccgctactgaaaatgccgcgaatacggtcgcccatgcccgaaaagcgatccataagatcctgaaaggtaatgatgatcgcctgttggtggtgattggcccatgctcaattcatgatcctgtcgcggctaaagagtatgccactcgcttgctgacgctgcgtgaagagctgcaagatgagctggaaatcgtgatgcgcgtctattttgaaaagccgcgtactacggtgggctggaaagggctgattaacgatccgcatatggataacagcttccagatcaacgacggtctgcgtattgcccgcaaattgctgctcgatattaacgacagcggtctgccagcggcgggtgaattcctggatatgatcaccctacaatatctcgctgacctgatgagctggggcgcaattggcgcacgtaccaccgaatcgcaggtgcaccgcgaactggcgtctggtctttcttgtccggtaggtttcaaaaatggcactgatggtacgattaaagtggctatcgatgccattaatgccgccggtgcgccgcactgcttcctgtccgtaacgaaatgggggcattcggcgattgtgaataccagcggtaacggcgattgccatatcattctgcgcggcggtaaagagcctaactacagcgcgaagcacgttgctgaagtgaaagaagggctgaacaaagcaggcctgccagcgcaggtgatgatcgatttcagccatgctaactcgtcaaaacaattcaaaaagcagatggatgtttgtactgacgtttgccagcagattgccggtggcgaaaaggccattattggcgtgatggtggaaagccatctggtggaaggcaatcagagcctcgagagcggggaaccgctggcctacggtaagagcatcaccgatgcctgcattggctgggatgataccgatgctctgttacgtcaactggcgagtgcagtaaaagcgcgtcgcgggtaatacttaagaaggagatatacatatgctgttattcgagactgtgcgtgaaatgggtcatgagcaagtccttttctgtcatagcaagaatcccgagatcaaggcaattatcgcaatccacgataccaccttaggaccggctatgggcgcaactcgtatcttaccttatattaatgaggaggctgccctgaaagatgcattacgtctgtcccgcggaatgacttacaaagcagcctgcgccaatattcccgccgggggcggcaaagccgtcatcatcgctaaccccgaaaacaagaccgatgacctgttacgcgcatacggccgtttcgtggacagcttgaacggccgtttcatcaccgggcaggacgttaacattacgcccgacgacgttcgcactatttcgcaggagactaagtacgtggtaggcgtctcagaaaagtcgggagggccggcacctatcacctctctgggagtatttttaggcatcaaagccgctgtagagtcgcgttggcagtctaaacgcctggatggcatgaaagtggcggtgcaaggacttgggaacgtaggaaaaaatctttgtcgccatctgcatgaacacgatgtacaactttttgtgtctgatgtcgatccaatcaaggccgaggaagtaaaacgcttattcggggcgactgttgtcgaaccgactgaaatctattctttagatgttgatatttttgcaccgtgtgcacttgggggtattttgaatagccataccatcccgttcttacaagcctcaatcatcgcaggagcagcgaataaccagctggagaacgagcaacttcattcgcagatgcttgcgaaaaagggtattctttactcaccagactacgttatcaatgcaggaggacttatcaatgtttataacgaaatgatcggatatgacgaggaaaaagcattcaaacaagttcataacatctacgatacgttattagcgattttcgaaattgcaaaagaacaaggtgtaaccaccaacgacgcggcccgtcgtttagcagaggatcgtatcaacaactccaaacgctcaaagagtaaagcgattgcggcgtgaaatgtaagaaggagatatacatatggaaaacaacaccaatatgttctctggagtgaaggtgatcgaactggccaactttatcgctgctccggcggcaggtcgcttctttgctgatgggggagcagaagtaattaagatcgaatctccagcaggcgacccgctgcgctacacggccccatcagaaggacgcccgctttctcaagaggaaaacacaacgtatgatttggaaaacgcgaataagaaagcaattgttctgaacttaaaatcggaaaaaggaaagaaaattcttcacgagatgcttgctgaggcagacatcttgttaacaaattggcgcacgaaagcgttagtcaaacaggggttagattacgaaacactgaaagagaagtatccaaaattggtatttgcacagattacaggatacggggagaaaggacccgacaaagacctgcctggtttcgactacacggcgtttttcgcccgcggaggagtctccggtacattatatgaaaaaggaactgtccctcctaatgtggtaccgggtctgggtgaccaccaggcaggaatgttcttagctgccggtatggctggtgcgttgtataaggccaaaaccaccggacaaggcgacaaagtcaccgttagtctgatgcatagcgcaatgtacggcctgggaatcatgattcaggcagcccagtacaaggaccatgggctggtgtacccgatcaaccgtaatgaaacgcctaatcctttcatcgtttcatacaagtccaaagatgattactttgtccaagtttgcatgcctccctatgatgtgttttatgatcgctttatgacggccttaggacgtgaagacttggtaggtgacgaacgctacaataagatcgagaacttgaaggatggtcgcgcaaaagaagtctattccatcatcgaacaacaaatggtaacgaagacgaaggacgaatgggacaagatttttcgtgatgcagacattccattcgctattgcccaaacgtgggaagatcttttagaagacgagcaggcatgggccaacgactacctgtataaaatgaagtatcccacaggcaacgaacgtgccctggtacgtttacctgtgttcttcaaagaagctggacttcctgaatacaaccagtcgccacagattgctgagaataccgtggaagtgttaaaggagatgggatataccgagcaagaaattgaggagcttgagaaagacaaagacatcatggtacgtaaagagaaatgaaggttaagaaggagatatacatatgtcagaccgcaacaaagaagtgaaagaaaagaaggctaaacactatctgcgcgagatcacagctaaacactacaaggaagcgttagaggctaaagagcgtggggagaaagtgggttggtgtgcctctaacttcccccaagagattgcaaccacgttgggtgtaaaggttgtttatcccgaaaaccacgccgccgccgtagcggcacgtggcaatgggcaaaatatgtgcgaacacgcggaggctatgggattcagtaatgatgtgtgtggatatgcacgtgtaaatttagccgtaatggacatcggccatagtgaagatcaacctattccaatgcctgatttcgttctgtgctgtaataatatctgcaatcagatgattaaatggtatgaacacattgcaaaaacgttggatattcctatgatccttatcgatattccatataatactgagaacacggtgtctcaggaccgcattaagtacatccgcgcccagttcgatgacgctatcaagcaactggaagaaatcactggcaaaaagtgggacgagaataaattcgaagaagtgatgaagatttcgcaagaatcggccaagcaatggttacgcgccgcgagctacgcgaaatacaaaccatcaccgttttcgggctttgacctttttaatcacatggctgtagccgtttgtgctcgcggcacccaggaagccgccgatgcattcaaaatgttagcagatgaatatgaagagaacgttaagacaggaaagtctacttatcgcggcgaggagaagcagcgtatcttgttcgagggcatcgcttgttggccttatctgcgccacaagttgacgaaactgagtgaatatggaatgaacgtcacagctacggtgtacgccgaagcttttggggttatttacgaaaacatggatgaactgatggccgcttacaataaagtgcctaactcaatctccttcgagaacgcgctgaagatgcgtcttaatgccgttacaagcaccaatacagaaggggctgttatccacattaatcgcagttgtaagctgtggtcaggattcttatacgaactggcccgtcgtttggaaaaggagacggggatccctgttgtttcgttcgacggagatcaagcggatccccgtaacttctccgaggctcaatatgacactcgcatccaaggtttaaatgaggtgatggtcgcgaaaaaagaagcagagtgagctttaagaaggagatatacatatgtcgaatagtgacaagttttttaacgacttcaaggacattgtggaaaacccaaagaagtatatcatgaagcatatggaacaaacgggacaaaaagccatcggttgcatgcctttatacaccccagaagagcttgtcttagcggcgggtatgtttcctgttggagtatggggctcgaatactgagttgtcaaaagccaagacctactttccggcttttatctgttctatcttgcaaactactttagaaaacgcattgaatggggagtatgacatgctgtctggtatgatgatcacaaactattgcgattcgctgaaatgtatgggacaaaacttcaaacttacagtggaaaatatcgaattcatcccggttacggttccacaaaaccgcaagatggaggcgggtaaagaatttctgaaatcccagtataaaatgaatatcgaacaactggaaaaaatctcagggaataagatcactgacgagagcttggagaaggctattgaaatttacgatgagcaccgtaaagtcatgaacgatttctctatgcttgcgtccaagtaccctggtatcattacgccaacgaaacgtaactacgtgatgaagtcagcgtattatatggacaagaaagaacatacagagaaggtacgtcagttgatggatgaaatcaaggccattgagcctaaaccattcgaaggaaaacgcgtgattaccactgggatcattgcagattcggaggaccttttgaaaatcttggaggagaataacattgctatcgtgggagatgatattgcacacgagtctcgccaataccgcactttgaccccggaggccaacacacctatggaccgtcttgctgaacaatttgcgaaccgcgagtgttcgacgttgtatgaccctgaaaaaaaacgtggacagtatattgtcgagatggcaaaagagcgtaaggccgacggaatcatcttcttcatgacaaaattctgcgatcccgaagaatacgattaccctcagatgaaaaaagacttcgaagaagccggtattccccacgttctgattgagacagacatgcaaatgaagaactacgaacaagctcgcaccgctattcaagcattttcagaaaccctttgacgcttaagaaggagatatacatatgttctttacggagcaacacgaacttattcgcaaactggcgcgtgactttgccgaacaggaaatcgagcctatcgcagacgaagtagataaaaccgcagagttcccaaaagaaatcgtgaagaagatggctcaaaatggatttttcggcattaaaatgcctaaagaatacggaggggcgggtgcggataaccgcgcttatgtcactattatggaggaaatttcacgtgcttccggggtagcgggtatctacctgagctcgccgaacagtttgttaggaactcccttcttattggtcggaaccgatgagcaaaaagaaaagtaccttaagcctatgatccgcggcgagaagactctggcgttcgccctgacagagcctggtgctggctctgatgcgggtgcgttggctactactgcccgtgaagagggcgactattatatcttaaatggccgcaagacgtttattacaggggctcctattagcgacaatattattgtgttcgcaaaaaccgatatgagcaaagggaccaaaggtatcaccactttcattgtggactcaaagcaggaaggggtaagttttggtaagccagaggacaaaatgggaatgattggttgtccgacaagcgacatcatcttggaaaacgttaaagttcataagtccgacatcttgggagaagtcaataaggggtttattaccgcgatgaaaacactttccgttggtcgtatcggagtggcgtcacaggcgcttggaattgcacaggccgccgtagatgaggcggtaaagtacgccaagcaacgtaaacaattcaatcgcccaatcgcgaaatttcaggccattcaatttaaacttgccaatatggagactaaattaaatgccgctaaacttcttgtttataacgcagcgtacaaaatggattgtggagaaaaagccgacaaggaagcctctatggctaaatactttgctgctgaatcagcgatccaaatcgttaacgacgcgctgcaaatccatggcgggtatggctatatcaaagactacaagattgaacgtttgtaccgcgatgtgcgtgtgatcgctatttatgagggcacttccgaggtccaacagatggttatcgcgtccaatctgctgaagtaatacttaagaaggagatatacatatgaaaatcttggcatactgcgtccgcccagacgaggtagactcctttaagaaatttagtgaaaagtacgggcatacagttgatcttattccagactcttttggacctaatgtcgctcatttggcgaagggttacgatgggatttctattctgggcaacgacacgtgtaaccgtgaggcactggagaagatcaaggattgcgggatcaaatatctggcaacccgtacagccggagtgaacaacattgacttcgatgcagcaaaggagttcggtattaacgtggctaatgttcccgcatattcccccaactcggtcagcgaatttaccattggattggcattaagtctgacgcgtaagattccatttgccctgaaacgcgtggaactgaacaattttgcgcttggcggccttattggtgtggaattgcgtaacttaactttaggagtcatcggtactggtcgcatcggattgaaagtgattgagggcttctctgggtttggaatgaaaaaaatgatcggttatgacatttttgaaaatgaagaagcaaagaagtacatcgaatacaaatcattagacgaagtttttaaagaggctgatattatcactctgcatgcgcctctgacagacgacaactatcatatgattggtaaagaatccattgctaaaatgaaggatggggtatttattatcaacgcagcgcgtggagccttaatcgatagtgaggccctgattgaagggttaaaatcggggaagattgcgggcgcggctctggatagctatgagtatgagcaaggtgtctttcacaacaataagatgaatgaaattatgcaggatgataccttggaacgtctgaaatcttttcccaacgtcgtgatcacgccgcatttgggtttttatactgatgaggcggtttccaatatggtagagatcacactgatgaaccttcaggaattcgagttgaaaggaacctgtaagaaccagcgtgtttgtaaatga

SEQ ID NO: 282 - DNA, 1134 bp, Artificial Sequence
  Synthetic
atgttctttacggagcaacacgaacttattcgcaaactggcgcgtgactttgccgaacaggaaatcgagcctatcgcagacgaagtagataaaaccgcagagttcccaaaagaaatcgtgaagaagatggctcaaaatggatttttcggcattaaaatgcctaaagaatacggaggggcgggtgcggataaccgcgcttatgtcactattatggaggaaatttcacgtgcttccggggtagcgggtatctacctgagctcgccgaacagtttgttaggaactcccttcttattggtcggaaccgatgagcaaaaagaaaagtaccttaagcctatgatccgcggcgagaagactctggcgttcgccctgacagagcctggtgctggctctgatgcgggtgcgttggctactactgcccgtgaagagggcgactattatatcttaaatggccgcaagacgtttattacaggggctcctattagcgacaatattattgtgttcgcaaaaaccgatatgagcaaagggaccaaaggtatcaccactttcattgtggactcaaagcaggaaggggtaagttttggtaagccagaggacaaaatgggaatgattggttgtccgacaagcgacatcatcttggaaaacgttaaagttcataagtccgacatcttgggagaagtcaataaggggtttattaccgcgatgaaaacactttccgttggtcgtatcggagtggcgtcacaggcgcttggaattgcacaggccgccgtagatgaggcggtaaagtacgccaagcaacgtaaacaattcaatcgcccaatcgcgaaatttcaggccattcaatttaaacttgccaatatggagactaaattaaatgccgctaaacttcttgtttataacgcagcgtacaaaatggattgtggagaaaaagccgacaaggaagcctctatggctaaatactttgctgctgaatcagcgatccaaatcgttaacgacgcgctgcaaatccatggcgggtatggctatatcaaagactacaagattgaacgtttgtaccgcgatgtgcgtgtgatcgctatttatgagggcacttccgaggtccaacagatggttatcgcgtccaatctgctgaagtaa

SEQ ID NO: 283 - DNA, 18 bp, Artificial Sequence
  Synthetic
taagaaggagatatacat

SEQ ID NO: 284 - DNA, 43 bp, Artificial Sequence; identical to SEQ ID NO: 182
  Synthetic

SEQ ID NO: 285-349 - skipped (65 entries)

SEQ ID NO: 350 - DNA, 967 bp, Artificial Sequence
  Synthetic
caaatatcacataatcttaacatatcaataaacacagtaaagtttcatgtgaaaaacatcaaacataaaatacaagctcggaatacgaatcacgctatacacattgctaacaggaatgagattatctaaatgaggattgatatattaattggacatactagtttttttcatcaaaccagtagagataacttccttcactatctcaatgaggaagaaataaaacgctatgatcagtttcattttgtgagtgataaagaactctatattttaagccgtatcctgctcaaaacagcactaaaaagatatcaacctgatgtctcattacaatcatggcaatttagtacgtgcaaatatggcaaaccatttatagtttttcctcagttggcaaaaaagattttttttaacctttcccatactatagatacagtagccgttgctattagttctcactgcgagcttggtgtcgatattgaacaaataagagatttagacaactcttatctgaatatcagtcagcatttttttactccacaggaagctactaacatagtttcacttcctcgttatgaaggtcaattacttttttggaaaatgtggacgctcaaagaagcttacatcaaatatcgaggtaaaggcctatctttaggactggattgtattgaatttcatttaacaaataaaaaactaacttcaaaatatagaggttcacctgtttatttctctcaatggaaaatatgtaactcatttctcgcattagcctctccactcatcacccctaaaataactattgagctatttcctatgcagtcccaactttatcaccacgactatcagctaattcattcgtcaaatgggcagaattgaatcgccacggataatctagacacttctgagccgtcgataatattgattttcatattccgtcggtggtgtaagtatcccgcataatcgtgccattcacatttag

SEQ ID NO: 351 - DNA, 424 bp, Artificial Sequence
  Synthetic
ggatggggggaaacatggataagttcaaagaaaaaaacccgttatctctgcgtgaaagacaagtattgcgcatgctggcacaaggtgatgagtactctcaaatatcacataatcttaacatatcaataaacacagtaaagtttcatgtgaaaaacatcaaacataaaatacaagctcggaatacgaatcacgctatacacattgctaacaggaatgagattatctaaatgaggattgatgtgtaggctggagctgcttcgaagttcctatactttctagagaataggaacttcggaataggaacttcggaataggaactaaggaggatattcatatgtcgtcaaatgggcagaattgaatcgccacggataatctagacacttctgagccgtcgataatattgattttcatattccgtcggtgg

SEQ ID NO: 352 - DNA, 2555 bp, Artificial Sequence
  Synthetic
actcttcctttttcaatattattgaagcatttatcagggttattgtctcatgagcggatacatatttgaatgtatttagaaaaataaacaaataggggaattaaaaaaaagcccgctcattaggcgggctactacctaggccgcggccgcgcgaattcgagctcggtacccggggatcctctagagtcgacctgcaggcatgcaagcttgcggccgcgtcgtgactgggaaaaccctggcgactagtcttggactcctgttgatagatccagtaatgacctcagaactccatctggatttgttcagaacgctcggttgccgccgggcgttttttattggtgagaatccaggggtccccaataattacgatttaaatcacagcaaacaccacgtcggccctatcagctgcgtgctttctatgagtcgttgctgcataacttgacaattaacatccggctcgtagggtttgtggagggcccaagttcacttaaaaaggagatcaacaatgaaagcaattttcgtactgaaacatcttaatcatgctggggagggtttctaatgttcacgggaagtattgtcgcgattgttactccgatggatgaaaaaggtaatgtctgtcgggctagcttgaaaaaactgattgattatcatgtcgccagcggtacttcggcgatcgtttctgttggcaccactggcgagtccgctaccttaaatcatgacgaacatgctgatgtggtgatgatgacgctggatctggctgatgggcgcattccggtaattgccgggaccggcgctaacgctactgcggaagccattagcctgacgcagcgcttcaatgacagtggtatcgtcggctgcctgacggtaaccccttactacaatcgtccgtcgcaagaaggtttgtatcagcatttcaaagccatcgctgagcatactgacctgccgcaaattctgtataatgtgccgtcccgtactggctgcgatctgctcccggaaacggtgggccgtctggcgaaagtaaaaaatattatcggaatcaaagaggcaacagggaacttaacgcgtgtaaaccagatcaaagagctggtttcagatgattttgttctgctgagcggcgatgatgcgagcgcgctggacttcatgcaattgggcggtcatggggttatttccgttacggctaacgtcgcagcgcgtgatatggcccagatgtgcaaactggcagcagaagggcattttgccgaggcacgcgttattaatcagcgtctgatgccattacacaacaaactatttgtcgaacccaatccaatcccggtgaaatgggcatgtaaggaactgggtcttgtggcgaccgatacgctgcgcctgccaatgacaccaatcaccgacagtggccgtgagacggtcagagcggcgcttaaacatgccggtttgctgtaagacttttgtcaggttcctactgtgacgactaccaccgatagactggagtgttgctgcgaaaaaaccccgccgaagcggggttttttgcgagaagtcaccacgattgtgctttacacggagtagtcggcagttccttaagtcagaatagtggacaggcggccaagaacttcgttcatgatagtctccggaacccgttcgagtcgttttccgccccgtgctttcatatcaattgtccggggttgatcgcaacgtacaacacctgtggtacgtatgccaacaccatccaacgacaccgcaaagccggcagtgcgggcaaaattgcctccgctggttacgggcacaacaacaggcaggcgggtcacgcgattaaaggccgccggtgtgacaatcagcaccggccgcgttccctgctgctcatgacctgcggtaggatcaagcgagacaagccagatttcccctctttccatctagtataactattgtttctctagtaacatttattgtacaacacgagcccatttttgtcaaataaattttaaattatatcaacgttaataagacgttgtcaataaaattattttgacaaaattggccggccggcgcgccgatctgaagatcagcagttcaacctgttgatagtacgtactaagctctcatgtttcacgtactaagctctcatgtttaacgtactaagctctcatgtttaacgaactaaaccctcatggctaacgtactaagctctcatggctaacgtactaagctctcatgtttcacgtactaagctctcatgtttgaacaataaaattaatataaatcagcaacttaaatagcctctaaggttttaagttttataagaaaaaaaagaatatataaggcttttaaagcctttaaggtttaacggttgtggacaacaagccagggatgtaacgcactgagaagcccttagagcctctcaaagcaattttgagtgacacaggaacacttaacggctgacatggggcgcgcccagctgtctagggcggcggatttgtcctactcaggagagcgttcaccgacaaacaacagataaaacgaaaggcccagtctttcgactgagcctttcgttttatttgatgcct

SEQ ID NO: 353 - DNA, 2472 bp, Artificial Sequence
  Synthetic
actcttcctttttcaatattattgaagcatttatcagggttattgtctcatgagcggatacatatttgaatgtatttagaaaaataaacaaataggggaattaaaaaaaagcccgctcattaggcgggctactacctaggccgcggccgcgcgaattcgagctcggtacccggggatcctctagagtcgacctgcaggcatgcaagcttgcggccgcgtcgtgactgggaaaaccctggcgactagtcttggactcctgttgatagatccagtaatgacctcagaactccatctggatttgttcagaacgctcggttgccgccgggcgttttttattggtgagaatccaggggtccccaataattacgatttaaatcacagcaaacaccacgtcggccctatcagctgcgtgctttctatgagtcgttgctgcataacttgacaattaatcatccggctcgtagggtttgtggagggcccaagttcacttaaaaaggagatcaacaatgaaagcaattttcgtactgaaacatcttaatcatgctggggagggtttctaatgaaacagtatttagaactgatgcaaaaagtgctcgacgaaggcacacagaaaaacgaccgtaccggaaccggaacgctttccatttttggtcatcagatgcgttttaacctgcaagatggattcccgctggtgacaactaaacgttgccacctgcgttccatcatccatgaactgctgtggtttcttcagggcgacactaacattgcttatctacacgaaaacaatgtcaccatctgggacgaatgggccgatgaaaacggcgacctcgggccagtgtatggtaaacagtggcgtgcctggccaacgccagatggtcgtcatattgaccagatcactacggtactgaaccagctgaaaaacgacccggattcgcgccgcattattgtttcagcgtggaacgtaggcgaactggataaaatggcgctggcaccgtgccatgcattcttccagttctatgtggcagacggcaaactctcttgccagctttatcagcgctcctgtgacgtcttcctcggcctgccgttcaacattgccagctacgcgttattggtgcatatgatggcgcagcagtgcgatctggaagtgggtgattttgtctggaccggtggcgacacgcatctgtacagcaaccatatggatcaaactcatctgcaattaagccgcgaaccgcgtccgctgccgaagttgattatcaaacgtaaacccgaatccatcttcgactaccgtttcgaagactttgagattgaaggctacgatccgcatccgggcattaaagcgccggtggctatctaagacttttgtcaggttcctactgtgacgactaccaccgatagactggagtgttgctgcgaaaaaaccccgccgaagcggggttttttgcgagaagtcaccacgattgtgctttacacggagtagtcggcagttccttaagtcagaatagtggacaggcggccaagaacttcgttcatgatagtctccggaacccgttcgagtcgttttccgccccgtgctttcatatcaattgtccggggttgatcgcaacgtacaacacctgtggtacgtatgccaacaccatccaacgacaccgcaaagccggcagtgcgggcaaaattgcctccgctggttacgggcacaacaacaggcaggcgggtcacgcgattaaaggccgccggtgtgacaatcagcaccggccgcgttccctgctgctcatgacctgcggtaggatcaagcgagacaagccagatttcccctctttccatctagtataactattgtttctctagtaacatttattgtacaacacgagcccatttttgtcaaataaattttaaattatatcaacgttaataagacgttgtcaataaaattattttgacaaaattggccggccggcgcgccgatctgaagatcagcagttcaacctgttgatagtacgtactaagctctcatgtttcacgtactaagctctcatgtttaacgtactaagctctcatgtttaacgaactaaaccctcatggctaacgtactaagctctcatggctaacgtactaagctctcatgtttcacgtactaagctctcatgtttgaacaataaaattaatataaatcagcaacttaaatagcctctaaggttttaagttttataagaaaaaaaagaatatataaggcttttaaagcctttaaggtttaacggttgtggacaacaagccagggatgtaacgcactgagaagcccttagagcctctcaaagcaattttgagtgacacaggaacacttaacggctgacatggggcgcgcccagctgtctagggcggcggatttgtcctactcaggagagcgttcaccgacaaacaacagataaaacgaaaggcccagtctttcgactgagcctttcgttttatttgatgcct

SEQ ID NO: 354 - DNA, 333 bp, Artificial Sequence
  Synthetic
ttaagtcagaatagtggacaggcggccaagaacttcgttcatgatagtctccggaacccgttcgagtcgttttccgccccgtgctttcatatcaattgtccggggttgatcgcaacgtacaacacctgtggtacgtatgccaacaccatccaacgacaccgcaaagccggcagtgcgggcaaaattgcctccgctggttacgggcacaacaacaggcaggcgggtcacgcgattaaaggccgccggtgtgacaatcagcaccggccgcgttccctgctgctcatgacctgcggtaggatcaagcgagacaagccagatttcccctctttccat

SEQ ID NO: 355 - DNA, 879 bp, Artificial Sequence
  Synthetic
atgttcacgggaagtattgtcgcgattgttactccgatggatgaaaaaggtaatgtctgtcgggctagcttgaaaaaactgattgattatcatgtcgccagcggtacttcggcgatcgtttctgttggcaccactggcgagtccgctaccttaaatcatgacgaacatgctgatgtggtgatgatgacgctggatctggctgatgggcgcattccggtaattgccgggaccggcgctaacgctactgcggaagccattagcctgacgcagcgcttcaatgacagtggtatcgtcggctgcctgacggtaaccccttactacaatcgtccgtcgcaagaaggtttgtatcagcatttcaaagccatcgctgagcatactgacctgccgcaaattctgtataatgtgccgtcccgtactggctgcgatctgctcccggaaacggtgggccgtctggcgaaagtaaaaaatattatcggaatcaaagaggcaacagggaacttaacgcgtgtaaaccagatcaaagagctggtttcagatgattttgttctgctgagcggcgatgatgcgagcgcgctggacttcatgcaattgggcggtcatggggttatttccgttacggctaacgtcgcagcgcgtgatatggcccagatgtgcaaactggcagcagaagggcattttgccgaggcacgcgttattaatcagcgtctgatgccattacacaacaaactatttgtcgaacccaatccaatcccggtgaaatgggcatgtaaggaactgggtcttgtggcgaccgatacgctgcgcctgccaatgacaccaatcaccgacagtggccgtgagacggtcagagcggcgcttaaacatgccggtttgctgtaa

SEQ ID NO: 356 - DNA, 795 bp, Artificial Sequence
  Synthetic
atgaaacagtatttagaactgatgcaaaaagtgctcgacgaaggcacacagaaaaacgaccgtaccggaaccggaacgctttccatttttggtcatcagatgcgttttaacctgcaagatggattcccgctggtgacaactaaacgttgccacctgcgttccatcatccatgaactgctgtggtttcttcagggcgacactaacattgcttatctacacgaaaacaatgtcaccatctgggacgaatgggccgatgaaaacggcgacctcgggccagtgtatggtaaacagtggcgtgcctggccaacgccagatggtcgtcatattgaccagatcactacggtactgaaccagctgaaaaacgacccggattcgcgccgcattattgtttcagcgtggaacgtaggcgaactggataaaatggcgctggcaccgtgccatgcattcttccagttctatgtggcagacggcaaactctcttgccagctttatcagcgctcctgtgacgtcttcctcggcctgccgttcaacattgccagctacgcgttattggtgcatatgatggcgcagcagtgcgatctggaagtgggtgattttgtctggaccggtggcgacacgcatctgtacagcaaccatatggatcaaactcatctgcaattaagccgcgaaccgcgtccgctgccgaagttgattatcaaacgtaaacccgaatccatcttcgactaccgtttcgaagactttgagattgaaggctacgatccgcatccgggcattaaagcgccggtggctatctaa

SEQ ID NO: 357 - protein, 110 aa, Artificial Sequence
  Synthetic
MERGEIWLVSLDPTAGHEQQGTRPVLIVTPAAFNRVTRLPVVVPVTSGGNFARTAGFAVSLDGVGIRTTGVVRCDQPRTIDMKARGGKRLERVPETIMNEVLGRLSTILT

SEQ ID NO: 358 - protein, 292 aa, Artificial Sequence
  Synthetic
MFTGSIVAIVTPMDEKGNVCRASLKKLIDYHVASGTSAIVSVGTTGESATLNHDEHADVVMMTLDLADGRIPVIAGTGANATAEAISLTQRFNDSGIVGCLTVTPYYNRPSQEGLYQHFKAIAEHTDLPQILYNVPSRTGCDLLPETVGRLAKVKNIIGIKEATGNLTRVNQIKELVSDDFVLLSGDDASALDFMQLGGHGVISVTANVAARDMAQMCKLAAEGHFAEARVINQRLMPLHNKLFVEPNPIPVKWACKELGLVATDTLRLPMTPITDSGRETVRAALKHAGLL

SEQ ID NO: 359 - protein, 264 aa, Artificial Sequence
  Synthetic
MKQYLELMQKVLDEGTQKNDRTGTGTLSIFGHQMRFNLQDGFPLVTTKRCHLRSIIHELLWFLQGDTNIAYLHENNVTIWDEWADENGDLGPVYGKQWRAWPTPDGRHIDQITTVLNQLKNDPDSRRIIVSAWNVGELDKMALAPCHAFFQFYVADGKLSCQLYQRSCDVFLGLPFNIASYALLVHMMAQQCDLEVGDFVWTGGDTHLYSNHMDQTHLQLSREPRPLPKLIIKRKPESIFDYRFEDFEIEGYDPHPGIKAPVAI

SEQ ID NO: 360 - DNA, 1490 bp, Artificial Sequence
  Synthetic
ttgacggctagctcagtcctaggtacagtgctagcggatctgctggaacaggtggtgagactcaaggtcatgatggacgtgaacaaaaaaacgaaaattcgccaccgaaacgagctaaatcacaccctggctcaacttcctttgcccgcaaagcgagtgatgtatatggcgcttgctcccattgatagcaaagaacctcttgaacgagggcgagttttcaaaattagggctgaagaccttgcagcgctcgccaaaatcaccccatcgcttgcttatcgacaattaaaagagggtggtaaattacttggtgccagcaaaatttcgctaagaggggatgatatcattgctttagctaaagagcttaacctgctctttactgctaaaaactcccctgaagagttagaccttaacattattgagtggatagcttattcaaatgatgaaggatacttgtctttaaaattcaccagaaccatagaaccatatatctctagccttattgggaaaaaaaataaattcacaacgcaattgttaacggcaagcttacgcttaagtagccagtattcatcttctctttatcaacttatcaggaagcattactctaattttaagaagaaaaattattttattatttccgttgatgagttaaaggaagagttaatagcttatacttttgataaagatggaaatattgagtacaaataccctgactttcctatttttaaaagggatgtgttaaataaagccattgctgaaattaaaaagaaaacagaaatatcgtttgttggcttcactgttcatgaaaaagaaggaagaaaaattagtaagctgaagttcgaatttgtcgttgatgaagatgaattttctggcgataaagatgatgaagctttttttatgaatttatctgaagctgatgcagcttttctcaaggtatttgatgaaaccgtacctcccaaaaaagctaaggggtgaggatctccaggcatcaaataaaacgaaaggctcagtcgaaagactgggcctttcgttttatctgttgtttgtcggtgaacgctctctactagagtcacactggctcaccttcgggtgggcctttctgcgtttatacccgggaaaaagagtattgacttaaagtctaacctataggtataatgtgtggagaccagaggtaaggaggtaacaaccatgcgagtgttgaagaaacatcttaatcatgctaaggaggttttctaatgcataccacccgactgaagagggttggcggctcagttatgctgaccgtcccaccggcactgctgaatgcgctgtctctgggcacagataatgaagttggcatggtcattgataatggccggctgattgttgagccgtacagacgcccgcaatattcactggctgagctactggcacagtgtgatccgaatgctgaaatatcagctgaagaacgagaatggctggatgcaccggcgactggtcaggaggaaatctga

SEQ ID NO: 361 - DNA, 1490 bp, Artificial Sequence
  Synthetic
ttgacggctagctcagtcctaggtacagtgctagcggatcttccggaagactaggtgagactcaaggtcatgatggacgtgaacaaaaaaacgaaaattcgccaccgaaacgagctaaatcacaccctggctcaacttcctttgcccgcaaagcgagtgatgtatatggcgcttgctcccattgatagcaaagaacctcttgaacgagggcgagttttcaaaattagggctgaagaccttgcagcgctcgccaaaatcaccccatcgcttgcttatcgacaattaaaagagggtggtaaattacttggtgccagcaaaatttcgctaagaggggatgatatcattgctttagctaaagagcttaacctgctctttactgctaaaaactcccctgaagagttagaccttaacattattgagtggatagcttattcaaatgatgaaggatacttgtctttaaaattcaccagaaccatagaaccatatatctctagccttattgggaaaaaaaataaattcacaacgcaattgttaacggcaagcttacgcttaagtagccagtattcatcttctctttatcaacttatcaggaagcattactctaattttaagaagaaaaattattttattatttccgttgatgagttaaaggaagagttaatagcttatacttttgataaagatggaaatattgagtacaaataccctgactttcctatttttaaaagggatgtgttaaataaagccattgctgaaattaaaaagaaaacagaaatatcgtttgttggcttcactgttcatgaaaaagaaggaagaaaaattagtaagctgaagttcgaatttgtcgttgatgaagatgaattttctggcgataaagatgatgaagctttttttatgaatttatctgaagctgatgcagcttttctcaaggtatttgatgaaaccgtacctcccaaaaaagctaaggggtgaggatctccaggcatcaaataaaacgaaaggctcagtcgaaagactgggcctttcgttttatctgttgtttgtcggtgaacgctctctactagagtcacactggctcaccttcgggtgggcctttctgcgtttatacccgggaaaaagagtattgacttaaagtctaacctataggtataatgtgtggagaccagaggtaaggaggtaacaaccatgcgagtgttgaagaaacatcttaatcatgctaaggaggttttctaatgcataccacccgactgaagagggttggcggctcagttatgctgaccgtcccaccggcactgctgaatgcgctgtctctgggcacagataatgaagttggcatggtcattgataatggccggctgattgttgagccgtacagacgcccgcaatattcactggctgagctactggcacagtgtgatccgaatgctgaaatatcagctgaagaacgagaatggctggatgcaccggcgactggtcaggaggaaatctga

SEQ ID NO: 362 - DNA, 917 bp, Artificial Sequence
  Synthetic
tgagactcaaggtcatgatggacgtgaacaaaaaaacgaaaattcgccaccgaaacgagctaaatcacaccctggctcaacttcctttgcccgcaaagcgagtgatgtatatggcgcttgctcccattgatagcaaagaacctcttgaacgagggcgagttttcaaaattagggctgaagaccttgcagcgctcgccaaaatcaccccatcgcttgcttatcgacaattaaaagagggtggtaaattacttggtgccagcaaaatttcgctaagaggggatgatatcattgctttagctaaagagcttaacctgctctttactgctaaaaactcccctgaagagttagaccttaacattattgagtggatagcttattcaaatgatgaaggatacttgtctttaaaattcaccagaaccatagaaccatatatctctagccttattgggaaaaaaaataaattcacaacgcaattgttaacggcaagcttacgcttaagtagccagtattcatcttctctttatcaacttatcaggaagcattactctaattttaagaagaaaaattattttattatttccgttgatgagttaaaggaagagttaatagcttatacttttgataaagatggaaatattgagtacaaataccctgactttcctatttttaaaagggatgtgttaaataaagccattgctgaaattaaaaagaaaacagaaatatcgtttgttggcttcactgttcatgaaaaagaaggaagaaaaattagtaagctgaagttcgaatttgtcgttgatgaagatgaattttctggcgataaagatgatgaagctttttttatgaatttatctgaagctgatgcagcttttctcaaggtatttgatgaaaccgtacctcccaaaaaagctaaggggtga

SEQ ID NO: 363 - DNA, 255 bp, Artificial Sequence
  Synthetic
cataccacccgactgaagagggttggcggctcagttatgctgaccgtcccaccggcactgctgaatgcgctgtctctgggcacagataatgaagttggcatggtcattgataatggccggctgattgttgagccgtacagacgcccgcaatattcactggctgagctactggcacagtgtgatccgaatgctgaaatatcagctgaagaacgagaatggctggatgcaccggcgactggtcaggaggaaatctga

SEQ ID NO: 364 - DNA, 14 bp, Artificial Sequence
  Synthetic
gctggaacaggtgg

SEQ ID NO: 365 - DNA, 14 bp, Artificial Sequence
  Synthetic
tccggaagactagg

SEQ ID NO: 366-562 - skipped (197 entries)

SEQ ID NO: 563 - DNA, 290 bp, Artificial Sequence
  Synthetic
gtcagcataacaccctgacctctcattaattgttcatgccgggcggcactatcgtcgtccggccttttcctctcttactctgctacgtacatctatttctataaatccgttcaatttgtctgttttttgcacaaacatgaaatatcagacaattccgtgacttaagaaaatttatacaaatcagcaatataccccttaaggagtatataaaggtgaatttgatttacatcaataagcggggttgctgaatcgttaaggtaggcggtaatagaaaagaaatcgaggcaaaa

SEQ ID NO: 564 - DNA, 173 bp, Artificial Sequence
  Synthetic
atttcctctcatcccatccggggtgagagtcttttcccccgacttatggctcatgcatgcatcaaaaaagatgtgagcttgatcaaaaacaaaaaatatttcactcgacaggagtatttatattgcgcccgttacgtgggcttcgactgtaaatcagaaaggagaaaacacct

SEQ ID NO: 565 - DNA, 305 bp, Artificial Sequence
  Synthetic
gtcagcataacaccctgacctctcattaattgttcatgccgggcggcactatcgtcgtccggccttttcctctcttactctgctacgtacatctatttctataaatccgttcaatttgtctgttttttgcacaaacatgaaatatcagacaattccgtgacttaagaaaatttatacaaatcagcaatataccccttaaggagtatataaaggtgaatttgatttacatcaataagcggggttgctgaatcgttaaggatccctctagaaataattttgtttaactttaagaaggagatatacat

SEQ ID NO: 566 - DNA, 180 bp, Artificial Sequence; identical to SEQ ID NO: 127
  Synthetic

SEQ ID NO: 567 - DNA, 199 bp, Artificial Sequence
  Synthetic
agttgttcttattggtggtgttgctttatggttgcatcgtagtaaatggttgtaacaaaagcaatttttccggctgtctgtatacaaaaacgccgtaaagtttgagcgaagtcaataaactctctacccattcagggcaatatctctcttggatccctctagaaataattttgtttaactttaagaaggagatatacat

SEQ ID NO: 568 - DNA, 117 bp, Artificial Sequence
  Synthetic
atccccatcactcttgatggagatcaattccccaagctgctagagcgttaccttgcccttaaacattagcaatgtcgatttatcagagggccgacaggctcccacaggagaaaaccg

SEQ ID NO: 569 - DNA, 108 bp, Artificial Sequence
  Synthetic
ctcttgatcgttatcaattcccacgctgtttcagagcgttaccttgcccttaaacattagcaatgtcgatttatcagagggccgacaggctcccacaggagaaaaccg

SEQ ID NO: 570 - DNA, 290 bp, Artificial Sequence; identical to SEQ ID NO: 563
  Synthetic

SEQ ID NO: 571 - DNA, 433 bp, Artificial Sequence
  Synthetic
cggcccgatcgttgaacatagcggtccgcaggcggcactgcttacagcaaacggtctgtacgctgtcgtctttgtgatgtgcttcctgttaggtttcgtcagccgtcaccgtcagcataacaccctgacctctcattaattgctcatgccggacggcactatcgtcgtccggccttttcctctcttcccccgctacgtgcatctatttctataaacccgctcattttgtctattttttgcacaaacatgaaatatcagacaattccgtgacttaagaaaatttatacaaatcagcaatatacccattaaggagtatataaaggtgaatttgatttacatcaataagcggggttgctgaatcgttaaggtaggcggtaatagaaaagaaatcgaggcaaaaatgtttgtttaactttaagaaggagatatacat

SEQ ID NO: 572 - DNA, 290 bp, Artificial Sequence
  Synthetic
gtcagcataacaccctgacctctcattaattgctcatgccggacggcactatcgtcgtccggccttttcctctcttcccccgctacgtgcatctatttctataaacccgctcattttgtctattttttgcacaaacatgaaatatcagacaattccgtgacttaagaaaatttatacaaatcagcaatatacccattaaggagtatataaaggtgaatttgatttacatcaataagcggggttgctgaatcgttaaggtaggcggtaatagaaaagaaatcgaggcaaaa

SEQ ID NO: 573 - DNA, 173 bp, Artificial Sequence; identical to SEQ ID NO: 564
  Synthetic

SEQ ID NO: 574 - DNA, 305 bp, Artificial Sequence; identical to SEQ ID NO: 565
  Synthetic

SEQ ID NO: 575 - DNA, 180 bp, Artificial Sequence; identical to SEQ ID NO: 127
  Synthetic

SEQ ID NO: 576 - DNA, 199 bp, Artificial Sequence; identical to SEQ ID NO: 567
  Synthetic

SEQ ID NO: 577 - DNA, 207 bp, Artificial Sequence
  Synthetic
agttgttcttattggtggtgttgctttatggttgcatcgtagtaaatggttgtaacaaaagcaatttttccggctgtctgtatacaaaaacgccgcaaagtttgagcgaagtcaataaactctctacccattcagggcaatatctctcttggatccaaagtgaactctagaaataattttgtttaactttaagaaggagatatacat

SEQ ID NO: 578 - DNA, 390 bp, Artificial Sequence
  Synthetic
tcgtctttgtgatgtgcttcctgttaggtttcgtcagccgtcaccgtcagcataacaccctgacctctcattaattgctcatgccggacggcactatcgtcgtccggccttttcctctcttcccccgctacgtgcatctatttctataaacccgctcattttgtctattttttgcacaaacatgaaatatcagacaattccgtgacttaagaaaatttatacaaatcagcaatatacccattaaggagtatataaaggtgaatttgatttacatcaataagcggggttgctgaatcgttaaggtagaaatgtgatctagttcacatttgcggtaatagaaaagaaatcgaggcaaaaatgtttgtttaactttaagaaggagatatacat

SEQ ID NO: 579 - DNA, 200 bp, Artificial Sequence
  Synthetic
agttgttcttattggtggtgttgctttatggttgcatcgtagtaaatggttgtaacaaaagcaatttttccggctgtctgtatacaaaaacgccgcaaagtttgagcgaagtcaataaactctctacccattcagggcaatatctctcaaatgtgatctagttcacattttttgtttaactttaagaaggagatatacat

SEQ ID NO: 580 - DNA, 355 bp, Artificial Sequence
  Synthetic
tgtggcttttatgaaaatcacacagtgatcacaaattttaaacagagcacaaaatgctgcctcgaaatgagggcgggaaaataaggttatcagccttgttttctccctcattacttgaaggatatgaagctaaaacccttttttataaagcatttgtccgaattcggacataatcaaaaaagcttaattaagatcaatttgatctacatctctttaaccaacaatatgtaagatctcaactatcgcatccgtggattaattcaattataacttctctctaacgctgtgtatcgtaacggtaacactgtagaggggagcacattgatgcgaattcattaaagaggagaaaggtacc

SEQ ID NO: 581 - DNA, 228 bp, Artificial Sequence
  Synthetic
ttccgaaaattcctggcgagcagataaataagaattgttcttatcaatatatctaactcattgaatctttattagttttgtttttcacgcttgttaccactattagtgtgataggaacagccagaatagcggaacacatagccggtgctatacttaatctcgttaattactgggacataacatcaagaggatatgaaattcgaattcattaaagaggagaaaggtacc

SEQ ID NO: 582 - DNA, 334 bp, Artificial Sequence
  Synthetic
gcttagatcaggtgattgccctttgtttatgagggtgttgtaatccatgtcgttgttgcatttgtaagggcaacacctcagcctgcaggcaggcactgaagataccaaagggtagttcagattacacggtcacctggaaagggggccattttactttttatcgccgctggcggtgcaaagttcacaaagttgtcttacgaaggttgtaaggtaaaacttatcgatttgataatggaaacgcattagccgaatcggcaaaaattggttaccttacatctcatcgaaaacacggaggaagtatagatgcgaattcattaaagaggagaaaggtacc

SEQ ID NO: 583 - DNA, 134 bp, Artificial Sequence
  Synthetic
ctcgagttcattatccatcctccatcgccacgatagttcatggcgataggtagaatagcaatgaacgattatccctatcaagcattctgactgataattgctcacacgaattcattaaagaggagaaaggtacc

SEQ ID NO: 584 - DNA, 1921 bp, Artificial Sequence
  Synthetic
ttacccgtctggattttcagtacgcgcttttaaacgacgccacagcgtggtacggctgatccccaaataacgtgcggcggcgcgcttatcgccattaaagcgtgcgagcacctcctgcaatggaagcgcttctgctgacgagggcgtgatttctgctgtggtccccaccagttcaggtaataattgccgcataaattgtctgtccagtgttggtgcgggatcgacgcttaaaaaaagcgccaggcgttccatcatattccgcagttcgcgaatattaccgggccaatgatagttcagtagaagcggctgacactgcgtcagcccatgacgcaccgattcggtaaaagggatctccatcgcggccagcgattgttttaaaaagttttccgccagaggcagaatatcaggctgtcgctcgcgcaaggggggaagcggcagacgcagaatgctcaaacggtaaaacagatcggtacgaaaacgtccttgcgttatctcccgatccagatcgcaatgcgtggcgctgatcacccggacatctaccgggatcggctgatgcccgccaacgcgggtgacggctttttcctccagtacgcgtagaaggcgggtttgtaacggcagcggcatttcgccaatttcgtcaagaaacagcgtgccgccgtgggcgacctcaaacagccccgcacgtccacctcgtcttgagccggtaaacgctccctcctcatagccaaacagttcagcctccagcaacgactcggtaatcgcgccgcaattaacggcgacaaagggcggagaaggcttgttctgacggtggggctgacggttaaacaacgcctgatgaatcgcttgcgccgccagctctttcccggtccctgtttccccctgaatcagcactgccgcgcgggaacgggcatagagtgtaatcgtatggcgaacctgctccatttgtggtgaatcgccgaggatatcgctcagcgcataacgggtctgtaatcccttgctggaggtatgctggctatactgacgccgtgtcaggcgggtcatatccagcgcatcatggaaagcctgacgtacggtggccgctgaataaataaagatggcggtcattcctgcctcttccgccaggtcggtaattagtcctgccccaattacagcctcaatgccgttagctttgagctcgttaatttgcccgcgagcatcctcttcagtgatatagcttcgctgttcaagacggaggtgaaacgttttctgaaaggcgaccagagccggaatggtctcctgataggtcacgattcccattgaggaagtcagctttcccgcttttgccagagcctgtaatacatcgaatccgctgggtttgatgaggatgacaggtaccgacagtcggctttttaaataagcgccgttggaacctgccgcgataatcgcgtcgcagcgttcggttgccagttttttgcgaatgtaggctactgccttttcaaaaccgagctgaataggcgtgatcgtcgccagatgatcaaactccaggctgatatcccgaaatagttcgaacaggcgcgttaccgagaccgtccagatcaccggtttatcgctattatcgcgcgaagcgctatgcacagtaaccatcgtcgtagattcatgtttaaggaacgaattcttgttttatagatgtttcgttaatgttgcaatgaaacacaggcctccgtttcatgaaacgttagctgactcgtttttcttgtgactcgtctgtcagtattaaaaaagatttttcatttaactgattgtttttaaattgaattttatttaatggtttctcggtttttgggtctggcatatcccttgctttaatgagtgcatcttaattaacaattcaataacaagagggctgaatagtaatttcaacaaaataacgagcattcgaatg

SEQ ID NO: 585 - DNA, 305 bp, Artificial Sequence
  Synthetic
cagacattgccgtcactgcgtcttttactggctcttctcgctaacccaaccggtaaccccgcttattaaaagcattctgtaacaaagcgggaccaaagccatgacaaaaacgcgtaacaaaagtgtctataatcacggcagaaaagtccacattgattatttgcacggcgtcacactttgctatgccatagcatttttatccataagattagcggatccagcctgacgctttttttcgcaactctctactgtttctccatacctctagaaataattttgtttaactttaagaaggagatatacat

SEQ ID NO: 586 - DNA, 897 bp, Artificial Sequence
  Synthetic
ttattcacaacctgccctaaactcgctcggactcgccccggtgcattttttaaatactcgcgagaaatagagttgatcgtcaaaaccgacattgcgaccgacggtggcgataggcatccgggtggtgctcaaaagcagcttcgcctgactgatgcgctggtcctcgcgccagcttaatacgctaatccctaactgctggcggaacaaatgcgacagacgcgacggcgacaggcagacatgctgtgcgacgctggcgatatcaaaattactgtctgccaggtgatcgctgatgtactgacaagcctcgcgtacccgattatccatcggtggatggagcgactcgttaatcgcttccatgcgccgcagtaacaattgctcaagcagatttatcgccagcaattccgaatagcgcccttccccttgtccggcattaatgatttgcccaaacaggtcgctgaaatgcggctggtgcgcttcatccgggcgaaagaaaccggtattggcaaatatcgacggccagttaagccattcatgccagtaggcgcgcggacgaaagtaaacccactggtgataccattcgtgagcctccggatgacgaccgtagtgatgaatctctccaggcgggaacagcaaaatatcacccggtcggcagacaaattctcgtccctgatttttcaccaccccctgaccgcgaatggtgagattgagaatataacctttcattcccagcggtcggtcgataaaaaaatcgagataaccgttggcctcaatcggcgttaaacccgccaccagatgggcgttaaacgagtatcccggcagcaggggatcattttgcgcttcagccatacttttcatactcccgccattcagagaagaaaccaattgtccatattgcat

SEQ ID NO: 587 - protein, 298 aa, Artificial Sequence
  Synthetic
MQYGQLVSSLNGGSMKSMAEAQNDPLLPGYSFNAHLVAGLTPIEANGYLDFFIDRPLGMKGYILNLTIRGQGVVKNQGREFVCRPGDILLFPPGEIHHYGRHPEAHEWYHQWVYFRPRAYWHEWLNWPSIFANTGFFRPDEAHQPHFSDLFGQIINAGQGEGRYSELLAINLLEQLLLRRMEAINESLHPPMDNRVREACQYISDHLADSNFDIASVAQHVCLSPSRLSHLFRQQLGISVLSWREDQRISQAKLLLSTTRMPIATVGRNVGFDDQLYFSRVFKKCTGASPSEFRAGCE

SEQ ID NO: 588 - DNA, 280 bp, Artificial Sequence
  Synthetic
cggtgagcatcacatcaccacaattcagcaaattgtgaacatcatcacgttcatctttccctggttgccaatggcccattttcctgtcagtaacgagaaggtcgcgaatcaggcgctttttagactggtcgtaatgaaattcagctgtcaccggatgtgctttccggtctgatgagtccgtgaggacgaaacagcctctacaaataattttgtttaaaacaacacccactaagataactctagaaataattttgtttaactttaagaaggagatatacat

SEQ ID NO: 589 - DNA, 326 bp, Artificial Sequence
  Synthetic
attcaccaccctgaattgactctcttccgggcgctatcatgccataccgcgaaaggttttgcgccattcgatggcgcgccgcttcgtcaggccacatagctttcttgttctgatcggaacgatcgttggctgtgttgacaattaatcatcggctcgtataatgtgtggaattgtgagcgctcacaattagctgtcaccggatgtgctttccggtctgatgagtccgtgaggacgaaacagcctctacaaataattttgtttaaaacaacacccactaagataactctagaaataattttgtttaactttaagaaggagatatacat

SEQ ID NO: 590 - DNA, 1083 bp, Artificial Sequence
  Synthetic
tcactgcccgctttccagtcgggaaacctgtcgtgccagctgcattaatgaatcggccaacgcgcggggagaggcggtttgcgtattgggcgccagggtggtttttcttttcaccagtgagactggcaacagctgattgcccttcaccgcctggccctgagagagttgcagcaagcggtccacgctggtttgccccagcaggcgaaaatcctgtttgatggtggttaacggcgggatataacatgagctatcttcggtatcgtcgtatcccactaccgagatatccgcaccaacgcgcagcccggactcggtaatggcgcgcattgcgcccagcgccatctgatcgttggcaaccagcatcgcagtgggaacgatgccctcattcagcatttgcatggtttgttgaaaaccggacatggcactccagtcgccttcccgttccgctatcggctgaatttgattgcgagtgagatatttatgccagccagccagacgcagacgcgccgagacagaacttaatgggcccgctaacagcgcgatttgctggtgacccaatgcgaccagatgctccacgcccagtcgcgtaccgtcctcatgggagaaaataatactgttgatgggtgtctggtcagagacatcaagaaataacgccggaacattagtgcaggcagcttccacagcaatggcatcctggtcatccagcggatagttaatgatcagcccactgacgcgttgcgcgagaagattgtgcaccgccgctttacaggcttcgacgccgcttcgttctaccatcgacaccaccacgctggcacccagttgatcggcgcgagatttaatcgccgcgacaatttgcgacggcgcgtgcagggccagactggaggtggcaacgccaatcagcaacgactgtttgcccgccagttgttgtgccacgcggttgggaatgtaattcagctccgccatcgccgcttccactttttcccgcgttttcgcagaaacgtggctggcctggttcaccacgcgggaaacggtctgataagagacaccggcatactctgcgacatcgtataacgttactggtttcat

SEQ ID NO: 591 - protein, 360 aa, Artificial Sequence
  Synthetic
MKPVTLYDVAEYAGVSYQTVSRVVNQASHVSAKTREKVEAAMAELNYIPNRVAQQLAGKQSLLIGVATSSLALHAPSQIVAAIKSRADQLGASVVVSMVERSGVEACKAAVHNLLAQRVSGLIINYPLDDQDAIAVEAACTNVPALFLDVSDQTPINSIIFSHEDGTRLGVEHLVALGHQQIALLAGPLSSVSARLRLAGWHKYLTRNQIQPIAEREGDWSAMSGFQQTMQMLNEGIVPTAMLVANDQMALGAMRAITESGLRVGADISVVGYDDTEDSSCYIPPLTTIKQDFRLLGQTSVDRLLQLSQGQAVKGNQLLPVSLVKRKTTLAPNTQTASPRALADSLMQLARQVSRLESGQ

SEQ ID NO: 592 - DNA, 222 bp, Artificial Sequence
  Synthetic
acgttaaatctatcaccgcaagggataaatatctaacaccgtgcgtgttgactattttacctctggcggtgataatggttgcatagctgtcaccggatgtgctttccggtctgatgagtccgtgaggacgaaacagcctctacaaataattttgtttaaaacaacacccactaagataactctagaaataattttgtttaactttaagaaggagatatacat

SEQ ID NO: 593 - DNA, 714 bp, Artificial Sequence
  Synthetic
tcagccaaacgtctcttcaggccactgactagcgataactttccccacaacggaacaactctcattgcatgggatcattgggtactgtgggtttagtggttgtaaaaacacctgaccgctatccctgatcagtttcttgaaggtaaactcatcacccccaagtctggctatgcagaaatcacctggctcaacagcctgctcagggtcaacgagaattaacattccgtcaggaaagcttggcttggagcctgttggtgcggtcatggaattaccttcaacctcaagccagaatgcagaatcactggcttttttggttgtgcttacccatctctccgcatcacctttggtaaaggttctaagcttaggtgagaacatccctgcctgaacatgagaaaaaacagggtactcatactcacttctaagtgacggctgcatactaaccgcttcatacatctcgtagatttctctggcgattgaagggctaaattcttcaacgctaactttgagaatttttgtaagcaatgcggcgttataagcatttaatgcattgatgccattaaataaagcaccaacgcctgactgccccatccccatcttgtctgcgacagattcctgggataagccaagttcatttttctttttttcataaattgctttaaggcgacgtgcgtcctcaagctgctcttgtgttaatggtttcttttttgtgctcat

SEQ ID NO: 594 - DNA, 43 bp, Artificial Sequence; identical to SEQ ID NO: 182
  Synthetic

SEQ ID NO: 595 - protein, 237 aa, Artificial Sequence
  Synthetic
MSTKKKPLTQEQLEDARRLKAIYEKKKNELGLSQESVADKMGMGQSGVGALFNGINALNAYNAALLTKILKVSVEEFSPSIAREIYEMYEAVSMQPSLRSEYEYPVFSHVQAGMFSPKLRTFTKGDAERWVSTTKKASDSAFWLEVEGNSMTAPTGSKPSFPDGMLILVDPEQAVEPGDFCIARLGGDEFTFKKLIRDSGQVFLQPLNPQYPMIPCNESCSVVGKVIASQWPEETFG

SEQ ID NO: 596 - DNA, 748 bp, Artificial Sequence
  Synthetic
ttaagacccactttcacatttaagttgtttttctaatccgcatatgatcaattcaaggccgaataagaaggctggctctgcaccttggtgatcaaataattcgatagcttgtcgtaataatggcggcatactatcagtagtaggtgtttccctttcttctttagcgacttgatgctcttgatcttccaatacgcaacctaaagtaaaatgccccacagcgctgagtgcatataatgcattctctagtgaaaaaccttgttggcataaaaaggctaattgattttcgagagtttcatactgtttttctgtaggccgtgtacctaaatgtacttttgctccatcgcgatgacttagtaaagcacatctaaaacttttagcgttattacgtaaaaaatcttgccagctttccccttctaaagggcaaaagtgagtatggtgcctatctaacatctcaatggctaaggcgtcgagcaaagcccgcttattttttacatgccaatacaatgtaggctgctctacacctagcttctgggcgagtttacgggttgttaaaccttcgattccgacctcattaagcagctctaatgcgctgttaatcactttacttttatctaatctagacatcattaattcctaatttttgttgacactctatcattgatagagttattttaccactccctatcagtgatagagaaaagtgaactctagaaataattttgtttaactttaagaaggagatatacat

SEQ ID NO: 597 - DNA, 225 bp, Artificial Sequence
  Synthetic
tcacctttcccggattaaacgcttttttgcccggtggcatggtgctaccggcgatcacaaacggttaattatgacacaaattgacctgaatgaatatacagtattggaatgcattacccggagtgttgtgtaacaatgtctggccaggtttgtttcccggaaccgaggtcacaacatagtaaaagcgctattggtaatggtacaatcgcgcgtttacacttattc

SEQ ID NO: 598 - DNA, 30 bp, Artificial Sequence
  Synthetic
gtttatacataggcgagtactctgttatgg

SEQ ID NO: 599 - DNA, 30 bp, Artificial Sequence
  Synthetic
agaggttccaactttcaccataatgaaaca

SEQ ID NO: 600 - DNA, 30 bp, Artificial Sequence
  Synthetic
taaacaactaacggacaattctacctaaca

SEQ ID NO: 601 - DNA, 30 bp, Artificial Sequence
  Synthetic
acatcaagccaaattaaacaggattaacac

SEQ ID NO: 602 - DNA, 30 bp, Artificial Sequence
  Synthetic
gaggtaaaatagtcaacacgcacggtgtta

SEQ ID NO: 603 - DNA, 30 bp, Artificial Sequence
  Synthetic
caggccggaataactccctataatgcgcca

SEQ ID NO: 604 - DNA, 30 bp, Artificial Sequence
  Synthetic
ggctagctcagtcctaggtacagtgctagc

SEQ ID NO: 605 - DNA, 30 bp, Artificial Sequence
  Synthetic
agctagctcagtcctaggtattatgctagc

SEQ ID NO: 606 - DNA, 30 bp, Artificial Sequence
  Synthetic
agctagctcagtcctaggtactgtgctagc

SEQ ID NO: 607 - DNA, 30 bp, Artificial Sequence
  Synthetic
agctagctcagtcctagggattatgctagc

SEQ ID NO: 608 - DNA, 30 bp, Artificial Sequence
  Synthetic
agctagctcagtcctaggtattgtgctagc

SEQ ID NO: 609 - DNA, 30 bp, Artificial Sequence
  Synthetic
ggctagctcagtcctaggtactatgctagc

SEQ ID NO: 610 - DNA, 30 bp, Artificial Sequence
  Synthetic
ggctagctcagtcctaggtatagtgctagc

SEQ ID NO: 611 - DNA, 30 bp, Artificial Sequence
  Synthetic
ggctagctcagccctaggtattatgctagc

SEQ ID NO: 612 - DNA, 30 bp, Artificial Sequence
  Synthetic
agctagctcagtcctaggtataatgctagc

SEQ ID NO: 613 - DNA, 30 bp, Artificial Sequence
  Synthetic
agctagctcagtcctagggactgtgctagc

SEQ ID NO: 614 - DNA, 30 bp, Artificial Sequence
  Synthetic
ggctagctcagtcctaggtacaatgctagc

SEQ ID NO: 615 - DNA, 30 bp, Artificial Sequence; identical to SEQ ID NO: 610
  Synthetic

SEQ ID NO: 616 - DNA, 30 bp, Artificial Sequence; identical to SEQ ID NO: 607
  Synthetic

SEQ ID NO: 617 - DNA, 30 bp, Artificial Sequence
  Synthetic
ggctagctcagtcctagggattatgctagc

SEQ ID NO: 618 - DNA, 30 bp, Artificial Sequence; identical to SEQ ID NO: 614
  Synthetic

SEQ ID NO: 619 - DNA, 30 bp, Artificial Sequence
  Synthetic
agctagctcagcccttggtacaatgctagc

SEQ ID NO: 620 - DNA, 30 bp, Artificial Sequence
  Synthetic
agctagctcagtcctagggactatgctagc

SEQ ID NO: 621 - DNA, 30 bp, Artificial Sequence
  Synthetic
agctagctcagtcctagggattgtgctagc

SEQ ID NO: 622 - DNA, 30 bp, Artificial Sequence
  Synthetic
ggctagctcagtcctaggtattgtgctagc

SEQ ID NO: 623 - DNA, 30 bp, Artificial Sequence; identical to SEQ ID NO: 612
  Synthetic

SEQ ID NO: 624 - DNA, 30 bp, Artificial Sequence
  Synthetic
ggctagctcagtcctaggtattatgctagc

SEQ ID NO: 625 - DNA, 30 bp, Artificial Sequence; identical to SEQ ID NO: 614
  Synthetic

SEQ ID NO: 626 - DNA, 30 bp, Artificial Sequence
  Synthetic
aaagtgtgacgccgtgcaaataatcaatgt

SEQ ID NO: 627 - DNA, 30 bp, Artificial Sequence
  Synthetic
gacgaatacttaaaatcgtcatacttattt

SEQ ID NO: 628 - DNA, 30 bp, Artificial Sequence
  Synthetic
aaacctttcgcggtatggcatgatagcgcc

SEQ ID NO: 629 - DNA, 30 bp, Artificial Sequence
  Synthetic
tgatagcgcccggaagagagtcaattcagg

SEQ ID NO: 630 - DNA, 30 bp, Artificial Sequence
  Synthetic
ttatttaccgtgacgaactaattgctcgtg

SEQ ID NO: 631 - DNA, 30 bp, Artificial Sequence
  Synthetic
catacgccgttatacgttgtttacgctttg

SEQ ID NO: 632 - DNA, 30 bp, Artificial Sequence
  Synthetic
ttatgcttccggctcgtatgttgtgtggac

SEQ ID NO: 633 - DNA, 30 bp, Artificial Sequence
  Synthetic
ttatgcttccggctcgtatggtgtgtggac

SEQ ID NO: 634 - DNA, 30 bp, Artificial Sequence; identical to SEQ ID NO: 609
  Synthetic

SEQ ID NO: 635 - DNA, 30 bp, Artificial Sequence
  Synthetic
atatatatatatatataatggaagcgtttt

SEQ ID NO: 636 - DNA, 30 bp, Artificial Sequence; identical to SEQ ID NO: 635
  Synthetic

SEQ ID NO: 637 - DNA, 30 bp, Artificial Sequence
  Synthetic
ccccgaaagcttaagaatataattgtaagc

SEQ ID NO: 638 - DNA, 30 bp, Artificial Sequence; identical to SEQ ID NO: 637
  Synthetic

SEQ ID NO: 639 - DNA, 30 bp, Artificial Sequence
  Synthetic
tgacaatatatatatatatataatgctagc

SEQ ID NO: 640 - DNA, 30 bp, Artificial Sequence
  Synthetic
acaatatatatatatatatataatgctagc

SEQ ID NO: 641 - DNA, 30 bp, Artificial Sequence
  Synthetic
aatatatatatatatatatataatgctagc

SEQ ID NO: 642 - DNA, 30 bp, Artificial Sequence
  Synthetic
tatatatatatatatatatataatgctagc

SEQ ID NO: 643 - DNA, 30 bp, Artificial Sequence; identical to SEQ ID NO: 642
  Synthetic

SEQ ID NO: 644 - DNA, 30 bp, Artificial Sequence
  Synthetic
aaaaaaaaaaaaaaaaaatataatgctagc

SEQ ID NO: 645 - DNA, 30 bp, Artificial Sequence; identical to SEQ ID NO: 644
  Synthetic

SEQ ID NO: 646 - DNA, 30 bp, Artificial Sequence
  Synthetic
ggaattgtgagcggataacaatttcacaca

SEQ ID NO: 647 - DNA, 30 bp, Artificial Sequence; identical to SEQ ID NO: 646
  Synthetic

SEQ ID NO: 648 - DNA, 30 bp, Artificial Sequence; identical to SEQ ID NO: 646
  Synthetic

SEQ ID NO: 649 - DNA, 30 bp, Artificial Sequence; identical to SEQ ID NO: 646
  Synthetic

SEQ ID NO: 650 - DNA, 30 bp, Artificial Sequence; identical to SEQ ID NO: 646
  Synthetic

SEQ ID NO: 651 - DNA, 30 bp, Artificial Sequence; identical to SEQ ID NO: 646
  Synthetic

SEQ ID NO: 652 - DNA, 30 bp, Artificial Sequence; identical to SEQ ID NO: 646
  Synthetic

SEQ ID NO: 653 - DNA, 30 bp, Artificial Sequence; identical to SEQ ID NO: 646
  Synthetic

SEQ ID NO: 654 - DNA, 30 bp, Artificial Sequence; identical to SEQ ID NO: 646
  Synthetic

SEQ ID NO: 655 - DNA, 30 bp, Artificial Sequence; identical to SEQ ID NO: 646
  Synthetic

SEQ ID NO: 656 - DNA, 30 bp, Artificial Sequence; identical to SEQ ID NO: 646
  Synthetic

SEQ ID NO: 657 - DNA, 30 bp, Artificial Sequence; identical to SEQ ID NO: 646
  Synthetic

SEQ ID NO: 658 - DNA, 30 bp, Artificial Sequence; identical to SEQ ID NO: 646
  Synthetic

SEQ ID NO: 659 - DNA, 30 bp, Artificial Sequence; identical to SEQ ID NO: 646
  Synthetic

SEQ ID NO: 660 - DNA, 30 bp, Artificial Sequence
  Synthetic
gattaaagaggagaaatactagagtactag

SEQ ID NO: 661 - DNA, 30 bp, Artificial Sequence
  Synthetic
caccttcgggtgggcctttctgcgtttata

SEQ ID NO: 662 - DNA, 30 bp, Artificial Sequence; identical to SEQ ID NO: 661
  Synthetic

SEQ ID NO: 663 - DNA, 30 bp, Artificial Sequence; identical to SEQ ID NO: 661
  Synthetic

SEQ ID NO: 664 - DNA, 30 bp, Artificial Sequence; identical to SEQ ID NO: 661
  Synthetic

SEQ ID NO: 665 - DNA, 30 bp, Artificial Sequence; identical to SEQ ID NO: 604
  Synthetic

SEQ ID NO: 666 - DNA, 30 bp, Artificial Sequence
  Synthetic
tgctagctactagagattaaagaggagaaa

SEQ ID NO: 667 - DNA, 30 bp, Artificial Sequence
  Synthetic
ttgtgagcggataacaagatactgagcaca

SEQ ID NO: 668 - DNA, 30 bp, Artificial Sequence; identical to SEQ ID NO: 667
  Synthetic

SEQ ID NO: 669 - DNA, 30 bp, Artificial Sequence; identical to SEQ ID NO: 667
  Synthetic

SEQ ID NO: 670 - DNA, 30 bp, Artificial Sequence; identical to SEQ ID NO: 604
  Synthetic

SEQ ID NO: 671 - DNA, 30 bp, Artificial Sequence; identical to SEQ ID NO: 605
  Synthetic

SEQ ID NO: 672 - DNA, 30 bp, Artificial Sequence; identical to SEQ ID NO: 606
  Synthetic

SEQ ID NO: 673 - DNA, 30 bp, Artificial Sequence; identical to SEQ ID NO: 607
  Synthetic

SEQ ID NO: 674 - DNA, 30 bp, Artificial Sequence; identical to SEQ ID NO: 610
  Synthetic

SEQ ID NO: 675 - DNA, 30 bp, Artificial Sequence; identical to SEQ ID NO: 617
  Synthetic

SEQ ID NO: 676 - DNA, 30 bp, Artificial Sequence; identical to SEQ ID NO: 614
  Synthetic

SEQ ID NO: 677 - DNA, 30 bp, Artificial Sequence; identical to SEQ ID NO: 621
  Synthetic

SEQ ID NO: 678 - DNA, 30 bp, Artificial Sequence; identical to SEQ ID NO: 622
  Synthetic

SEQ ID NO: 679 - DNA, 30 bp, Artificial Sequence
  Synthetic
cctgtttttatgttattctctctgtaaagg

SEQ ID NO: 680 - DNA, 30 bp, Artificial Sequence
  Synthetic
aaatatttgcttatacaatcttcctgtttt

SEQ ID NO: 681 - DNA, 30 bp, Artificial Sequence
  Synthetic
gctgataaaccgatacaattaaaggctcct

SEQ ID NO: 682 - DNA, 30 bp, Artificial Sequence
  Synthetic
ctcttctcagcgtcttaatctaagctatcg

SEQ ID NO: 683 - DNA, 30 bp, Artificial Sequence
  Synthetic
atgagccagttcttaaaatcgcataaggta

SEQ ID NO: 684 - DNA, 30 bp, Artificial Sequence
  Synthetic
ctattgattgtgacaaaataaacttattcc

SEQ ID NO: 685 - DNA, 30 bp, Artificial Sequence
  Synthetic
gtttcgcgcttggtataatcgctgggggtc

SEQ ID NO: 686 - DNA, 30 bp, Artificial Sequence
  Synthetic
ctttgcttctgactataatagtcagggtaa

SEQ ID NO: 687 - DNA, 30 bp, Artificial Sequence
  Synthetic
aaaccgatacaattaaaggctcctgctagc

SEQ ID NO: 688 - DNA, 30 bp, Artificial Sequence
  Synthetic
caccacactgatagtgctagtgtagatcac

SEQ ID NO: 689 - DNA, 30 bp, Artificial Sequence
  Synthetic
gccggaataactccctataatgcgccacca

SEQ ID NO: 690 - DNA, 30 bp, Artificial Sequence
  Synthetic
ttgacaagcttttcctcagctccgtaaact

SEQ ID NO: 691 - DNA, 30 bp, Artificial Sequence
  Synthetic
ggtttcaaaattgtgatctatatttaacaa

SEQ ID NO: 692 - DNA, 30 bp, Artificial Sequence; identical to SEQ ID NO: 691
  Synthetic

SEQ ID NO: 693 - DNA, 30 bp, Artificial Sequence
  Synthetic
tctattccaataaagaaatcttcctgcgtg

SEQ ID NO: 694 - DNA, 30 bp, Artificial Sequence
  Synthetic
gaccgaatatatagtggaaacgtttagatg

SEQ ID NO: 695 - DNA, 30 bp, Artificial Sequence
  Synthetic
ccacatcctgtttttaaccttaaaatggca

SEQ ID NO: 696 - DNA, 30 bp, Artificial Sequence
  Synthetic
aaaaatgggctcgtgttgtacaataaatgt

SEQ ID NO: 697 - DNA, 30 bp, Artificial Sequence
  Synthetic
aaaaaaagcgcgcgattatgtaaaatataa

SEQ ID NO: 698 - DNA, 30 bp, Artificial Sequence
  Synthetic
aattgcagtaggcatgacaaaatggactca

SEQ ID NO: 699 - DNA, 30 bp, Artificial Sequence
  Synthetic
caagcttttcctttataatagaatgaatga

SEQ ID NO: 700 - DNA, 30 bp, Artificial Sequence
  Synthetic
tctaagctagtgtattttgcgtttaatagt

SEQ ID NO: 701 - DNA, 30 bp, Artificial Sequence
  Synthetic
aatgggctcgtgttgtacaataaatgtagt

SEQ ID NO: 702 - DNA, 30 bp, Artificial Sequence
  Synthetic
atccttatcgttatgggtattgtttgtaat

SEQ ID NO: 703 - DNA, 30 bp, Artificial Sequence
  Synthetic
taaaagaattgtgagcgggaatacaacaac

SEQ ID NO: 704 - DNA, 30 bp, Artificial Sequence; identical to SEQ ID NO: 697
  Synthetic

SEQ ID NO: 705 - DNA, 30 bp, Artificial Sequence
  Synthetic
tacaaaataattcccctgcaaacattatca

SEQ ID NO: 706 - DNA, 30 bp, Artificial Sequence
  Synthetic
tacaaaataattcccctgcaaacattatcg

SEQ ID NO: 707 - DNA, 30 bp, Artificial Sequence
  Synthetic
agggaatacaagctacttgttctttttgca

SEQ ID NO: 708 - DNA, 23 bp, Artificial Sequence
  Synthetic
taatacgactcactatagggaga

SEQ ID NO: 709 - DNA, 28 bp, Artificial Sequence
  Synthetic
gaatttaatacgactcactatagggaga

SEQ ID NO: 710 - DNA, 19 bp, Artificial Sequence
  Synthetic
taatacgactcactatagg

SEQ ID NO: 711 - DNA, 30 bp, Artificial Sequence
  Synthetic
gagtcgtattaatacgactcactatagggg

SEQ ID NO: 712 - DNA, 30 bp, Artificial Sequence
  Synthetic
agtgagtcgtactacgactcactatagggg

SEQ ID NO: 713 - DNA, 30 bp, Artificial Sequence
  Synthetic
gagtcgtattaatacgactctctatagggg

SEQ ID NO: 714 - DNA, 18 bp, Artificial Sequence
  Synthetic
taatacgactcactatag

SEQ ID NO: 715 - DNA, 23 bp, Artificial Sequence
  Synthetic
taatacgactcactatagggaga

SEQ ID NO: 716 - DNA, 23 bp, Artificial Sequence
  Synthetic
ttatacgactcactatagggaga

SEQ ID NO: 717 - DNA, 23 bp, Artificial Sequence
  Synthetic
gaatacgactcactatagggaga

SEQ ID NO: 718 - DNA, 23 bp, Artificial Sequence
  Synthetic
taatacgtctcactatagggaga

SEQ ID NO: 719 - DNA, 23 bp, Artificial Sequence
  Synthetic
tcatacgactcactatagggaga

SEQ ID NO: 720 - DNA, 30 bp, Artificial Sequence
  Synthetic
taatacgactcactatagggagaccacaac

SEQ ID NO: 721 - DNA, 30 bp, Artificial Sequence
  Synthetic
taattgaactcactaaagggagaccacagc

SEQ ID NO: 722 - DNA, 30 bp, Artificial Sequence
  Synthetic
cgaagtaatacgactcactattagggaaga

SEQ ID NO: 723 - DNA, 19 bp, Artificial Sequence
  Synthetic
atttaggtgacactataga

SEQ ID NO: 724 - DNA, 30 bp, Artificial Sequence
  Synthetic
acaaacacaaatacacacactaaattaata

SEQ ID NO: 725 - DNA, 30 bp, Artificial Sequence
  Synthetic
ccaagcatacaatcaactatctcatataca

SEQ ID NO: 726 - DNA, 30 bp, Artificial Sequence
  Synthetic
gatacaggatacagcggaaacaacttttaa

SEQ ID NO: 727 - DNA, 30 bp, Artificial Sequence
  Synthetic
tttcaagctataccaagcatacaatcaact

SEQ ID NO: 728 - DNA, 30 bp, Artificial Sequence
  Synthetic
cctttgcagcataaattactatacttctat

SEQ ID NO: 729 - DNA, 30 bp, Artificial Sequence; identical to SEQ ID NO: 728
  Synthetic

SEQ ID NO: 730 - DNA, 30 bp, Artificial Sequence; identical to SEQ ID NO: 728
  Synthetic

SEQ ID NO: 731 - DNA, 30 bp, Artificial Sequence; identical to SEQ ID NO: 728
  Synthetic

SEQ ID NO: 732 - DNA, 30 bp, Artificial Sequence; identical to SEQ ID NO: 728
  Synthetic

SEQ ID NO: 733 - DNA, 30 bp, Artificial Sequence
  Synthetic
ttatctactttttacaacaaatataaaaca

SEQ ID NO: 734 - DNA, 30 bp, Artificial Sequence; identical to SEQ ID NO: 724
  Synthetic

SEQ ID NO: 735 - DNA, 30 bp, Artificial Sequence
  Synthetic
gtttcgaataaacacacataaacaaacaaa

SEQ ID NO: 736 - DNA, 30 bp, Artificial Sequence; identical to SEQ ID NO: 725
  Synthetic

SEQ ID NO: 737 - DNA, 30 bp, Artificial Sequence
  Synthetic
accatcaaaggaagctttaatcttctcata

SEQ ID NO: 738 - DNA, 30 bp, Artificial Sequence
  Synthetic
agaacccactgcttactggcttatcgaaat

SEQ ID NO: 739 - DNA, 30 bp, Artificial Sequence
  Synthetic
ggccgtttttggcttttttgttagacgaag

SEQ ID NO: 740 - DNA, 66 bp, Artificial Sequence
  Synthetic
ataagtgccttcccatcaaaaaaatattctcaacataaaaaactttgtgtaatacttgtaacgcta

SEQ ID NO: 741 - DNA, 52 bp, Artificial Sequence
  Synthetic
aaaaagagtattgacttcgcatctttttgtacctataatagattcattgcta

SEQ ID NO: 742 - DNA, 59 bp, Artificial Sequence
  Synthetic
ggaaaatttttttaaaaaaaaaactttacagctagctcagtcctaggtattatgctagc

SEQ ID NO: 743 - DNA, 59 bp, Artificial Sequence
  Synthetic
ggaaaatttttttaaaaaaaaaactttacggctagctcagccctaggtattatgctagc

SEQ ID NO: 744 - DNA, 64 bp, Artificial Sequence
  Synthetic
ggaaaatttttttaaaaaaaaaacttgacagctagctcagtccttggtataatgctagcacgaa

SEQ ID NO: 745-868 - skipped (124 entries)

SEQ ID NO: 869 - DNA, 28 bp, Artificial Sequence
  Synthetic
tctagagaaagacccgagacactagatg

SEQ ID NO: 870 - DNA, 28 bp, Artificial Sequence
  Synthetic
tctagagaaagaccggaaatactagatg

SEQ ID NO: 871 - DNA, 28 bp, Artificial Sequence
  Synthetic
tctagagaaagaccggagacactagatg

SEQ ID NO: 872 - skipped

SEQ ID NO: 873 - DNA, 28 bp, Artificial Sequence
  Synthetic
tctagagaaagacaggattaactagatg

SEQ ID NO: 874 - DNA, 28 bp, Artificial Sequence
  Synthetic
tctagagaaagagctgagcaactagatg

SEQ ID NO: 875 - DNA, 28 bp, Artificial Sequence
  Synthetic
tctagagaaagagtagatcaactagatg

SEQ ID NO: 876 - DNA, 28 bp, Artificial Sequence
  Synthetic
tctagagaaagatatgaataactagatg

SEQ ID NO: 877 - DNA, 28 bp, Artificial Sequence
  Synthetic
tctagagaaagattagagtcactagatg

SEQ ID NO: 878-879 - skipped (2 entries)

SEQ ID NO: 880 - DNA, 31 bp, Artificial Sequence
  Synthetic
tctagagttcacacaggaaacctactagatg

SEQ ID NO: 881 - DNA, 31 bp, Artificial Sequence
  Synthetic
tctagagattaaagaggagaaatactagatg

SEQ ID NO: 882 - DNA, 30 bp, Artificial Sequence
  Synthetic
tctagagtcacacaggaaacctactagatg

SEQ ID NO: 883 - DNA, 29 bp, Artificial Sequence
  Synthetic
tctagagtcacacaggaaagtactagatg

SEQ ID NO: 884 - DNA, 27 bp, Artificial Sequence
  Synthetic
tctagagtcacacaggactactagatg

SEQ ID NO: 885 - DNA, 28 bp, Artificial Sequence
  Synthetic
tctagagaaagaggagaaatactagatg

SEQ ID NO: 886 - DNA, 30 bp, Artificial Sequence
  Synthetic
tctagagattaaagaggagaatactagatg

SEQ ID NO: 887 - DNA, 28 bp, Artificial Sequence
  Synthetic
tctagagaaagaggggaaatactagatg

SEQ ID NO: 888-1017 - skipped (130 entries)

SEQ ID NO: 1018 - DNA, 28 bp, Artificial Sequence
  Synthetic
  misc_feature (13)..(15): n is a, c, g, or t
  misc_feature (18)..(20): n is a, c, g, or t
tctagagaaagannngannnactagatg

SEQ ID NO: 1019 - DNA, 28 bp, Artificial Sequence
  Synthetic
tctagagaaagaggggacaaactagatg

SEQ ID NO: 1020 - DNA, 28 bp, Artificial Sequence
  Synthetic
tctagagaaagacaggacccactagatg

SEQ ID NO: 1021 - DNA, 28 bp, Artificial Sequence
  Synthetic
tctagagaaagatccgatgtactagatg

SEQ ID NO: 1022 - DNA, 28 bp, Artificial Sequence
  Synthetic
tctagagaaagattagacaaactagatg

SEQ ID NO: 1023 - DNA, 28 bp, Artificial Sequence
  Synthetic
tctagagaaagaagggacagactagatg

SEQ ID NO: 1024 - DNA, 28 bp, Artificial Sequence
  Synthetic
tctagagaaagacatgacgtactagatg

SEQ ID NO: 1025 - DNA, 28 bp, Artificial Sequence
  Synthetic
tctagagaaagataggagacactagatg

SEQ ID NO: 1026 - DNA, 28 bp, Artificial Sequence
  Synthetic
tctagagaaagaagagactcactagatg

SEQ ID NO: 1027 - DNA, 28 bp, Artificial Sequence
  Synthetic
tctagagaaagacgagatatactagatg

SEQ ID NO: 1028 - DNA, 28 bp, Artificial Sequence
  Synthetic
tctagagaaagactggagacactagatg

SEQ ID NO: 1029 - DNA, 28 bp, Artificial Sequence
  Synthetic
tctagagaaagaggcgaattactagatg

SEQ ID NO: 1030 - DNA, 28 bp, Artificial Sequence
  Synthetic
tctagagaaagaggcgatacactagatg

SEQ ID NO: 1031 - DNA, 28 bp, Artificial Sequence
  Synthetic
tctagagaaagaggtgacatactagatg

SEQ ID NO: 1032 - DNA, 28 bp, Artificial Sequence
  Synthetic
tctagagaaagagtggaaaaactagatg

SEQ ID NO: 1033 - DNA, 28 bp, Artificial Sequence
  Synthetic
tctagagaaagatgagaagaactagatg

SEQ ID NO: 1034 - DNA, 28 bp, Artificial Sequence
  Synthetic
tctagagaaagaagggatacactagatg

SEQ ID NO: 1035 - DNA, 28 bp, Artificial Sequence
  Synthetic
tctagagaaagacatgaggcactagatg

SEQ ID NO: 1036 - DNA, 28 bp, Artificial Sequence
  Synthetic
tctagagaaagacatgagttactagatg

SEQ ID NO: 1037 - DNA, 28 bp, Artificial Sequence
  Synthetic
tctagagaaagagacgaatcactagatg

SEQ ID NO: 1038 - DNA, 28 bp, Artificial Sequence
  Synthetic
tctagagaaagatttgatatactagatg

SEQ ID NO: 1039 - DNA, 28 bp, Artificial Sequence
  Synthetic
tctagagaaagacgcgagaaactagatg

SEQ ID NO: 1040 - DNA, 28 bp, Artificial Sequence
  Synthetic
tctagagaaagagacgagtcactagatg

SEQ ID NO: 1041 - DNA, 28 bp, Artificial Sequence
  Synthetic
tctagagaaagagaggagccactagatg

SEQ ID NO: 1042 - DNA, 28 bp, Artificial Sequence
  Synthetic
tctagagaaagagatgactaactagatg

SEQ ID NO: 1043 - DNA, 28 bp, Artificial Sequence
  Synthetic
tctagagaaagagccgacatactagatg

SEQ ID NO: 1044 - DNA, 28 bp, Artificial Sequence
  Synthetic
tctagagaaagagccgagttactagatg

SEQ ID NO: 1045 - DNA, 28 bp, Artificial Sequence
  Synthetic
tctagagaaagaggtgactcactagatg

SEQ ID NO: 1046 - DNA, 28 bp, Artificial Sequence
  Synthetic
tctagagaaagagtggaactactagatg

SEQ ID NO: 1047 - DNA, 28 bp, Artificial Sequence
  Synthetic
tctagagaaagataggactcactagatg

SEQ ID NO: 1048 - DNA, 28 bp, Artificial Sequence
  Synthetic
tctagagaaagattggacgtactagatg

SEQ ID NO: 1049 - DNA, 28 bp, Artificial Sequence
  Synthetic
tctagagaaagaaacgacatactagatg

SEQ ID NO: 1050 - DNA, 28 bp, Artificial Sequence
  Synthetic
tctagagaaagaaccgaattactagatg

SEQ ID NO: 1051-1499 - skipped (449 entries)

SEQ ID NO: 1500 - protein, 21 aa, Artificial Sequence
  Synthetic
MKQSTIALALLPLLFTPVTKA

SEQ ID NO: 1501 - protein, 20 aa, Artificial Sequence
  Synthetic
KQSTIALALLPLLFTPVTKA

SEQ ID NO: 1502 - protein, 22 aa, Artificial Sequence
  Synthetic
MMKRNILAVIVPALLVAGTANA

SEQ ID NO: 1503 - protein, 15 aa, Artificial Sequence
  Synthetic
MRTLTLNELDSVSGG

SEQ ID NO: 1504 - protein, 43 aa, Artificial Sequence
  Synthetic
MNNNDLFQASRRRFLAQLGGLTVAGMLGTSLLTPRRATAAQAA

SEQ ID NO: 1505 - protein, 33 aa, Artificial Sequence
  Synthetic
MDVSRRQFFKICAGGMAGTTVAALGFAPKQALA

SEQ ID NO: 1506 - protein, 45 aa, Artificial Sequence
  Synthetic
MKTKIPDAVLAAEVSRRGLVKTTAIGGLAMASSALTLPFSRIAHA

SEQ ID NO: 1507 - protein, 21 aa, Artificial Sequence
  Synthetic
KYLLPTAAAGLLLLAAQPAMA

SEQ ID NO: 1508 - protein, 52 aa, Artificial Sequence
  Synthetic
LNPLINEISKIISAAGNFDVKEERAAASLLQLSGNASDFSYGRNSITLTASA

SEQ ID NO: 1509 - DNA, 159 bp, Artificial Sequence
  Synthetic
cttaatccattaattaatgaaatcagcaaaatcatttcagctgcaggtaattttgatgttaaagaggaaagagctgcagcttctttattgcagttgtccggtaatgccagtgatttttcatatggacggaactcaataactttgacagcatcagcataa

SEQ ID NO: 1510 - DNA, 1233 bp, Artificial Sequence
  Synthetic
atggcaaaggtatcgctggagaaagacaagattaagtttctgctggtagaaggcgtgcaccaaaaggcgctggaaagccttcgtgcagctggttacaccaacatcgaatttcacaaaggcgcgctggatgatgaacaattaaaagaatccatccgcgatgcccacttcatcggcctgcgatcccgtacccatctgactgaagacgtgatcaacgccgcagaaaaactggtcgctattggctgtttctgtatcggaacaaatcaggttgatctggatgcggcggcaaagcgcgggatcccggtatttaacgcaccgttctcaaatacgcgctctgttgcggagctggtgattggcgaactgctgctgctattgcgcggcgtgccagaagccaatgctaaagcgcatcgtggcgtgtggaacaaactggcggcgggttcttttgaagcgcgcggcaaaaagctgggtatcatcggctacggtcatattggtacgcaattgggcattctggctgaatcgctgggaatgtatgtttacttttatgatattgaaaacaaactgccgctgggcaacgccactcaggtacagcatctttctgacctgctgaatatgagcgatgtggtgagtctgcatgtaccagagaatccgtccaccaaaaatatgatgggcgcgaaagagatttcgctaatgaagcccggctcgctgctgattaatgcttcgcgcggtactgtggtggatattccagcgctgtgtgacgcgctggcgagcaaacatctggcgggggcggcaatcgacgtattcccgacggaaccggcgaccaatagcgatccatttacctctccgctgtgtgaattcgacaatgtccttctgacgccacacattggcggttcgactcaggaagcgcaggagaatatcggcttggaagttgcgggtaaattgatcaagtattctgacaatggctcaacgctctctgcggtgaacttcccggaagtctcgctgccactgcacggtgggcgtcgtctgatgcacatcgctgaagctcgtccgggcgtgctaactgcgctcaacaaaatttttgccgagcagggcgtcaacatcgccgcgcaatatctacaaacttccgcccagatgggttatgtagttattgatattgaagccgacgaagacgttgccgaaaaagcgctgcaggcaatgaaagctattccgggtaccattcgcgcccgtctgctgtactaa

SEQ ID NO: 1511 - protein, 52 aa, Artificial Sequence
  Synthetic
MKRHLNTSYRLVWNHITGAFVVASELARARGKRAGVAVALSLAAATSLPALA

SEQ ID NO: 1512 - protein, 40 aa, Artificial Sequence
  Synthetic
MFWRDMTLSVWRKKTTGLKTKKRLLALVLAAALCSSPVWA

SEQ ID NO: 1513 - protein, 33 aa, Artificial Sequence
  Synthetic
MGYKMNISSLRKAFIFMGAVAALSLVNAQSALA

SEQ ID NO: 1514 - protein, 53 aa, Artificial Sequence
  Synthetic
MNKIFKVIWNPATGSYTVASETAKSRGKKSGRSKLLISALVAGGLLSSFGASA
